(19) United States
(12) Patent Application Publication
(10) Pub. No.: US 2011/0217706 A1
(43) Pub. Date: Sep. 8, 2011

(54) GENE METHYLATION IN CANCER DIAGNOSIS

(76) Inventors: Rebecca Maloney, St. Louis, MO (US); Arief Budiman, Manchester, MO (US); Yulia Korshunova, Clayton, MO (US); Jared Ordway, St. Louis, MO (US)

(21) Appl. No.: 13/058,191

(22) PCT Filed: Aug. 7, 2009
(86) PCT No.: PCT/US2009/053122

§ 371 Date: May 20, 2011

Related U.S. Application Data
(60) Provisional application No. 61/087,530, filed on Aug. 8, 2008.

(51) Int. Cl. C12Q 1/68; G06F 19/00

(52) U.S. Cl. 435/6.11; 702/19

(57) ABSTRACT

DNA biomarker sequences that are differentially methylated in samples from normal individuals and individuals with cancer are provided Additionally, methods of identifying differentially methylated DNA biomarker sequences and their use for the detection and diagnosis of cancer are provided.

### CROSS-REFERENCE TO RELATED PATENT APPLICATIONS

[0001] The present application claims benefit of priority to U.S. Provisional Patent Application No. 61/087,530, filed Aug. 8, 2008, which is incorporated by reference for all purposes.

### BACKGROUND OF THE INVENTION

[0002] Human cancer cells typically contain somatically altered genomes, characterized by mutation, amplification, or deletion of critical genes. In addition, the DNA template from human cancer cells often displays somatic changes in DNA methylation. See, e.g., E. R. Fearon, et al, Cell 61:759 (1990); P. A. Jones, et al., Cancer Res. 46:461 (1986); R. Holliday, Science 238:163 (1987); A. De Bustros, et al., Proc. Natl. Acad. Sci. USA 85:5693 (1988); P. A. Jones, et al., Adv. Cancer Res. 54:1 (1990); S. B. Baylin, et al., Cancer Cells 3:383 (1991); M. Makos, et al., Proc. Natl. Acad Sci. USA 89:1929 (1992); N. Ohtani-Fujita, et al., Oncogene 8:1063 (1993).

[0003] DNA methylases transfer methyl groups from the universal methyl donor S-adenosyl methionine to specific sites on the DNA. Several biological functions have been attributed to the methylated bases in DNA. The most established biological function is the protection of the DNA from digestion by cognate restriction enzymes. This restriction modification phenomenon has, so far, been observed only in bacteria.

[0004] Mammalian cells, however, possess different methylases that exclusively methylate cytosine residues on the DNA that are 5′ neighbors of guanine (CpG). This methylation has been shown by several lines of evidence to play a role in gene activity, cell differentiation, tumorigenesis, X-chromosome inactivation, genomic imprinting and other major biological processes (Razin, A., H., and Riggs, R. D. eds. in DNA Methylation Biochemistry and Biological Significance, Springer-Verlag, N.Y., 1984).

[0005] In eukaryotic cells, methylation of cytosine residues that are immediately 5′ to a guanosine, occurs predominantly in CG poor loci (Bird, A., Nature 321:209 (1986)). In contrast, discrete regions of CG dinucleotides called CG islands (CGi) remain unmethylated in normal cells, except during X-chromosome inactivation and parental specific imprinting (Li, et al., Nature 366:362 (1993)) where methylation of 5′ regulatory regions can lead to transcriptional repression. For example, de novo methylation of the Rb gene has been demonstrated in a small fraction of retinoblastomas (Sakai, et al., Am. J. Hum. Genet., 48:880 (1991)), and a more detailed analysis of the VHL gene showed aberrant methylation in a subset of sporadic renal cell carcinomas (Herman, et al., Proc. Natl. Acad. Sci. U.S.A., 91:9700 (1994)). Expression of a tumor suppressor gene can also be abolished by de novo DNA methylation of a normally unmethylated 5′ CG island. See, e.g., Issa, et al., Nature Genet. 7:536 (1994); Merlo, et al., Nature Med. 1:686 (1995); Herman, et al., Cancer Res., 56:722 (1996); Graff, et al., Cancer Res., 55:5195 (1995); Herman, et al., Cancer Res. 55:4525 (1995).

[0006] Identification of the earliest genetic and epigenetic changes in tumorigenesis is a major focus in molecular cancer research. Diagnostic approaches based on identification of these changes can allow implementation of early detection strategies, tumor staging, and novel therapeutic approaches targeting these early changes, all of which lead to more effective cancer treatment. The present invention addresses these and other problems.

### BRIEF SUMMARY OF THE INVENTION

[0007] The present invention provides methods for determining the methylation status of an individual. In one aspect, the methods comprise:

[0008] obtaining a biological sample from an individual; and

[0009] determining the methylation status of at least one cytosine within a DNA region in a sample from an individual where the DNA region is at least 90%, 91%, 92%, 93%, 94%, 95%, 96%, 97%, 98%, or 99% identical to, or comprises, a sequence selected from the group consisting of SEQ ID NOS:385, 386, 387, 388, 389, 390, 391, 392, 393, 394, 395, 396, 397, 398, 399, 400, 401, 402, 403, 404, 405, 406, 407, 408, 409, 410, 411, 412, 413, 414, 415, 416, 417, 418, 419, 420, 421, 422, 423, 424, 425, 426, 427, 428, 429, 430, 431, 432, 433, 434, 435, 436, 437, 438, 439, 440, 441, 442, 443, 444, 445, 446, 447, 448, 449, 450, 451, 452, 453, 454, 455, 456, 457, 458, 459, 460, 461, 462, 463, 464, 465, 466, 467, 468, 469, 470, 471, 472, 473, 474, 475, 476, 477, 478, 479 and 480.

[0010] In a further aspect, the methods comprise determining (e.g. correlating methylation status to) the presence or absence of cancer, including but not limited to, bladder, breast, cervical, colon, endometrial, esophageal, head and neck, liver, lung, melanoma, ovarian, prostate, renal, and thyroid cancer, in an individual.

[0011] In some embodiments, the methods comprise:

[0012] a) determining the methylation status of at least one cytosine within a DNA region in a sample from the individual where the DNA region is at least 90%, 91%, 92%, 93%, 94%, 95%, 96%, 97%, 98%, or 99% identical to, or comprises, a sequence selected from the group consisting of SEQ ID NOS:385, 386, 387, 388, 389, 390, 391, 392, 393, 394, 395, 396, 397, 398, 399, 400, 401, 402, 403, 404, 405, 406, 407, 408, 409, 410, 411, 412, 413, 414, 415, 416, 417, 418, 419, 420, 421, 422, 423, 424, 425, 426, 427, 428, 429, 430, 431, 432, 433, 434, 435, 436, 437, 438, 439, 440, 441, 442, 443, 444, 445, 446, 447, 448, 449, 450, 451, 452, 453, 454, 455, 456, 457, 458, 459, 460, 461, 462, 463, 464, 465, 466, 467, 468, 469, 470, 471, 472, 473, 474, 475, 476, 477, 478, 479 and 480;

[0013] b) comparing the methylation status of the at least one cytosine to a threshold value for the biomarker, wherein the threshold value distinguishes between individuals with and without cancer, wherein the comparison of the methylation status to the threshold value is predictive of the presence or absence of cancer in the individual.

[0014] In some embodiments, the methods comprise:

[0015] a) determining the methylation status of at least one cytosine within a DNA region in a sample from the individual where the DNA region is at least 90%, 91%, 92%, 93%, 94%, 95%, 96%, 97%, 98%, or 99% identical to, or comprises, a sequence selected from the group consisting of SEQ ID NOS:385, 386, 387, 388, 389, 390, 391, 392, 393, 394, 395, 396, 397, 398, 399, 400, 401, 402, 403, 404, 405, 406, 407, 408, 409, 410, 411, 412, 413, 414, 415, 416, 417, 418, 419, 420, 421, 422, 423, 424, 425, 426, 427, 428, 429, 430, 431, 432, 433, 434, 435, 436, 437, 438, 439, 440, 441, 442, 443, 444, 445, 446, 447, 448, 449, 450, 451, 452, 453, 454, 455, 456, 457, 458, 459, 460, 461, 462, 463, 464, 465, 466, 467, 468, 469, 470, 471, 472, 473, 474, 475, 476, 477, 478, 479 and 480;

[0016] b) comparing the methylation status of the at least one cytosine to a threshold value for the biomarker, wherein the threshold value distinguishes between individuals with and without bladder cancer, wherein the comparison of the methylation status to the threshold value is predictive of the presence or absence of bladder cancer in the individual.

[0017] In some embodiments, the methods comprise:

[0018] a) determining the methylation status of at least one cytosine within a DNA region in a sample from the individual where the DNA region is at least 90%, 91%, 92%, 93%, 94%, 95%, 96%, 97%, 98%, or 99% identical to, or comprises, a sequence selected from the group consisting of SEQ ID NOS:385, 386, 387, 388, 389, 390, 391, 392, 393, 394, 395, 396, 397, 398, 399, 400, 401, 402, 403, 404, 405, 406, 407, 408, 409, 410, 411, 412, 413, 414, 415, 416, 417, 418, 419, 420, 421, 422, 423, 424, 425, 426, 427, 428, 429, 430, 431, 432, 433, 434, 435, 436, 437, 438, 439, 440, 441, 442, 443, 444, 445, 446, 447, 448, 449, 450, 451, 452, 453, 454, 455, 456, 457, 458, 459, 460, 461, 462, 463, 464, 465, 466, 467, 468, 469, 470, 471, 472, 473, 474, 475, 476, 477, 478, 479 and 480;

[0019] b) comparing the methylation status of the at least one cytosine to a threshold value for the biomarker, wherein the threshold value distinguishes between individuals with and without breast cancer, wherein the comparison of the methylation status to the threshold value is predictive of the presence or absence of breast cancer in the individual.

[0020] In some embodiments, the methods comprise:

[0021] a) determining the methylation status of at least one cytosine within a DNA region in a sample from the individual where the DNA region is at least 90%, 91%, 92%, 93%, 94%, 95%, 96%, 97%, 98%, or 99% identical to, or comprises, a sequence selected from the group consisting of SEQ ID NOS:385, 386, 387, 388, 389, 390, 391, 392, 393, 394, 395, 396, 397, 398, 399, 400, 401, 402, 403, 404, 405, 406, 407, 408, 409, 410, 411, 412, 413, 414, 415, 416, 417, 418, 419, 420, 421, 422, 423, 424, 425, 426, 427, 428, 429, 430, 431, 432, 433, 434, 435, 436, 437, 438, 439, 440, 441, 442, 443, 444, 445, 446, 447, 448, 449, 450, 451, 452, 453, 454, 455, 456, 457, 458, 459, 460, 461, 462, 463, 464, 465, 466, 467, 468, 469, 470, 471, 472, 473, 474, 475, 476, 477, 478, 479 and 480;

[0022] b) comparing the methylation status of the at least one cytosine to a threshold value for the biomarker, wherein the threshold value distinguishes between individuals with and without cervical cancer, wherein the comparison of the methylation status to the threshold value is predictive of the presence or absence of cervical cancer in the individual.

[0023] In some embodiments, the methods comprise:

[0024] a) determining the methylation status of at least one cytosine within a DNA region in a sample from the individual where the DNA region is at least 90%, 91%, 92%, 93%, 94%, 95%, 96%, 97%, 98%, or 99% identical to, or comprises, a sequence selected from the group consisting of SEQ ID NOS:385, 386, 387, 388, 389, 390, 391, 392, 393, 394, 395, 396, 397, 398, 399, 400, 401, 402, 403, 404, 405, 406, 407, 408, 409, 410, 411, 412, 413, 414, 415, 416, 417, 418, 419, 420, 421, 422, 423, 424, 425, 426, 427, 428, 429, 430, 431, 432, 433, 434, 435, 436, 437, 438, 439, 440, 441, 442, 443, 444, 445, 446, 447, 448, 449, 450, 451, 452, 453, 454, 455, 456, 457, 458, 459, 460, 461, 462, 463, 464, 465, 466, 467, 468, 469, 470, 471, 472, 473, 474, 475, 476, 477, 478, 479 and 480;

[0025] b) comparing the methylation status of the at least one cytosine to a threshold value for the biomarker, wherein the threshold value distinguishes between individuals with and without colon cancer, wherein the comparison of the methylation status to the threshold value is predictive of the presence or absence of colon cancer in the individual.

[0026] In some embodiments, the methods comprise:

[0027] a) determining the methylation status of at least one cytosine within a DNA region in a sample from the individual where the DNA region is at least 90%, 91%, 92%, 93%, 94%, 95%, 96%, 97%, 98%, or 99% identical to, or comprises, a sequence selected from the group consisting of SEQ ID NOS:385, 386, 387, 388, 389, 390, 391, 392, 393, 394, 395, 396, 397, 398, 399, 400, 401, 402, 403, 404, 405, 406, 407, 408, 409, 410, 411, 412, 413, 414, 415, 416, 417, 418, 419, 420, 421, 422, 423, 424, 425, 426, 427, 428, 429, 430, 431, 432, 433, 434, 435, 436, 437, 438, 439, 440, 441, 442, 443, 444, 445, 446, 447, 448, 449, 450, 451, 452, 453, 454, 455, 456, 457, 458, 459, 460, 461, 462, 463, 464, 465, 466, 467, 468, 469, 470, 471, 472, 473, 474, 475, 476, 477, 478, 479 and 480;

[0028] b) comparing the methylation status of the at least one cytosine to a threshold value for the biomarker, wherein the threshold value distinguishes between individuals with and without endometrial cancer, wherein the comparison of the methylation status to the threshold value is predictive of the presence or absence of endometrial cancer in the individual.

[0029] In some embodiments, the methods comprise:

[0030] a) determining the methylation status of at least one cytosine within a DNA region in a sample from the individual where the DNA region is at least 90%, 91%, 92%, 93%, 94%, 95%, 96%, 97%, 98%, or 99% identical to, or comprises, a sequence selected from the group consisting of SEQ ID NOS:385, 386, 387, 388, 389, 390, 391, 392, 393, 394, 395, 396, 397, 398, 399, 400, 401, 402, 403, 404, 405, 406, 407, 408, 409, 410, 411, 412, 413, 414, 415, 416, 417, 418, 419, 420, 421, 422, 423, 424, 425, 426, 427, 428, 429, 430, 431, 432, 433, 434, 435, 436, 437, 438, 439, 440, 441, 442, 443, 444, 445, 446, 447, 448, 449, 450, 451, 452, 453, 454, 455, 456, 457, 458, 459, 460, 461, 462, 463, 464, 465, 466, 467, 468, 469, 470, 471, 472, 473, 474, 475, 476, 477, 478, 479 and 480;

[0031] b) comparing the methylation status of the at least one cytosine to a threshold value for the biomarker, wherein the threshold value distinguishes between individuals with and without esophageal cancer, wherein the comparison of the methylation status to the threshold value is predictive of the presence or absence of esophageal cancer in the individual.

[0032] In some embodiments, the methods comprise:

[0033] a) determining the methylation status of at least one cytosine within a DNA region in a sample from the individual where the DNA region is at least 90%, 91%, 92%, 93%, 94%, 95%, 96%, 97%, 98%, or 99% identical to, or comprises, a sequence selected from the group consisting of SEQ ID NOS:385, 386, 387, 388, 389, 390, 391, 392, 393, 394, 395, 396, 397, 398, 399, 400, 401, 402, 403, 404, 405, 406, 407, 408, 409, 410, 411, 412, 413, 414, 415, 416, 417, 418, 419, 420, 421, 422, 423, 424, 425, 426, 427, 428, 429, 430, 431, 432, 433, 434, 435, 436, 437, 438, 439, 440, 441, 442, 443, 444, 445, 446, 447, 448, 449, 450, 451, 452, 453, 454, 455, 456, 457, 458, 459, 460, 461, 462, 463, 464, 465, 466, 467, 468, 469, 470, 471, 472, 473, 474, 475, 476, 477, 478, 479 and 480;

[0034] b) comparing the methylation status of the at least one cytosine to a threshold value for the biomarker, wherein the threshold value distinguishes between individuals with and without head and neck cancer, wherein the comparison of the methylation status to the threshold value is predictive of the presence or absence of head and neck cancer in the individual.

[0035] In some embodiments, the methods comprise:

[0036] a) determining the methylation status of at least one cytosine within a DNA region in a sample from the individual where the DNA region is at least 90%, 91%, 92%, 93%, 94%, 95%, 96%, 97%, 98%, or 99% identical to, or comprises, a sequence selected from the group consisting of SEQ ID NOS:385, 386, 387, 388, 389, 390, 391, 392, 393, 394, 395, 396, 397, 398, 399, 400, 401, 402, 403, 404, 405, 406, 407, 408, 409, 410, 411, 412, 413, 414, 415, 416, 417, 418, 419, 420, 421, 422, 423, 424, 425, 426, 427, 428, 429, 430, 431, 432, 433, 434, 435, 436, 437, 438, 439, 440, 441, 442, 443, 444, 445, 446, 447, 448, 449, 450, 451, 452, 453, 454, 455, 456, 457, 458, 459, 460, 461, 462, 463, 464, 465, 466, 467, 468, 469, 470, 471, 472, 473, 474, 475, 476, 477, 478, 479 and 480;

[0037] b) comparing the methylation status of the at least one cytosine to a threshold value for the biomarker, wherein the threshold value distinguishes between individuals with and without liver cancer, wherein the comparison of the methylation status to the threshold value is predictive of the presence or absence of liver cancer in the individual.

[0038] In some embodiments, the methods comprise:

[0039] a) determining the methylation status of at least one cytosine within a DNA region in a sample from the individual where the DNA region is at least 90%, 91%, 92%, 93%, 94%, 95%, 96%, 97%, 98%, or 99% identical to, or comprises, a sequence selected from the group consisting of SEQ ID NOS:385, 386, 387, 388, 389, 390, 391, 392, 393, 394, 395, 396, 397, 398, 399, 400, 401, 402, 403, 404, 405, 406, 407, 408, 409, 410, 411, 412, 413, 414, 415, 416, 417, 418, 419, 420, 421, 422, 423, 424, 425, 426, 427, 428, 429, 430, 431, 432, 433, 434, 435, 436, 437, 438, 439, 440, 441, 442, 443, 444, 445, 446, 447, 448, 449, 450, 451, 452, 453, 454, 455, 456, 457, 458, 459, 460, 461, 462, 463, 464, 465, 466, 467, 468, 469, 470, 471, 472, 473, 474, 475, 476, 477, 478, 479 and 480;

[0040] b) comparing the methylation status of the at least one cytosine to a threshold value for the biomarker, wherein the threshold value distinguishes between individuals with and without lung cancer, wherein the comparison of the methylation status to the threshold value is predictive of the presence or absence of lung cancer in the individual.

[0041] In some embodiments, the methods comprise:

[0042] a) determining the methylation status of at least one cytosine within a DNA region in a sample from the individual where the DNA region is at least 90%, 91%, 92%, 93%, 94%, 95%, 96%, 97%, 98%, or 99% identical to, or comprises, a sequence selected from the group consisting of SEQ ID NOS:385, 386, 387, 388, 389, 390, 391, 392, 393, 394, 395, 396, 397, 398, 399, 400, 401, 402, 403, 404, 405, 406, 407, 408, 409, 410, 411, 412, 413, 414, 415, 416, 417, 418, 419, 420, 421, 422, 423, 424, 425, 426, 427, 428, 429, 430, 431, 432, 433, 434, 435, 436, 437, 438, 439, 440, 441, 442, 443, 444, 445, 446, 447, 448, 449, 450, 451, 452, 453, 454, 455, 456, 457, 458, 459, 460, 461, 462, 463, 464, 465, 466, 467, 468, 469, 470, 471, 472, 473, 474, 475, 476, 477, 478, 479 and 480;

[0043] b) comparing the methylation status of the at least one cytosine to a threshold value for the biomarker, wherein the threshold value distinguishes between individuals with and without melanoma, wherein the comparison of the methylation status to the threshold value is predictive of the presence or absence of melanoma in the individual.

[0044] In some embodiments, the methods comprise:

[0045] a) determining the methylation status of at least one cytosine within a DNA region in a sample from the individual where the DNA region is at least 90%, 91%, 92%, 93%, 94%, 95%, 96%, 97%, 98%, or 99% identical to, or comprises, a sequence selected from the group consisting of SEQ ID NOS:385, 386, 387, 388, 389, 390, 391, 392, 393, 394, 395, 396, 397, 398, 399, 400, 401, 402, 403, 404, 405, 406, 407, 408, 409, 410, 411, 412, 413, 414, 415, 416, 417, 418, 419, 420, 421, 422, 423, 424, 425, 426, 427, 428, 429, 430, 431, 432, 433, 434, 435, 436, 437, 438, 439, 440, 441, 442, 443, 444, 445, 446, 447, 448, 449, 450, 451, 452, 453, 454, 455, 456, 457, 458, 459, 460, 461, 462, 463, 464, 465, 466, 467, 468, 469, 470, 471, 472, 473, 474, 475, 476, 477, 478, 479 and 480;

[0046] b) comparing the methylation status of the at least one cytosine to a threshold value for the biomarker, wherein the threshold value distinguishes between individuals with and without ovarian cancer, wherein the comparison of the methylation status to the threshold value is predictive of the presence or absence of ovarian cancer in the individual.

[0047] In some embodiments, the methods comprise:

[0048] a) determining the methylation status of at least one cytosine within a DNA region in a sample from the individual where the DNA region is at least 90%, 91%, 92%, 93%, 94%, 95%, 96%, 97%, 98%, or 99% identical to, or comprises, a sequence selected from the group consisting of SEQ ID NOS:385, 386, 387, 388, 389, 390, 391, 392, 393, 394, 395, 396, 397, 398, 399, 400, 401, 402, 403, 404, 405, 406, 407, 408, 409, 410, 411, 412, 413, 414, 415, 416, 417, 418, 419, 420, 421, 422, 423, 424, 425, 426, 427, 428, 429, 430, 431, 432, 433, 434, 435, 436, 437, 438, 439, 440, 441, 442, 443, 444, 445, 446, 447, 448, 449, 450, 451, 452, 453, 454, 455, 456, 457, 458, 459, 460, 461, 462, 463, 464, 465, 466, 467, 468, 469, 470, 471, 472, 473, 474, 475, 476, 477, 478, 479 and 480;

[0049] b) comparing the methylation status of the at least one cytosine to a threshold value for the biomarker, wherein the threshold value distinguishes between individuals with and without prostate cancer, wherein the comparison of the methylation status to the threshold value is predictive of the presence or absence of prostate cancer in the individual.

[0050] In some embodiments, the methods comprise:

[0051] a) determining the methylation status of at least one cytosine within a DNA region in a sample from the individual where the DNA region is at least 90%, 91%, 92%, 93%, 94%, 95%, 96%, 97%, 98%, or 99% identical to, or comprises, a sequence selected from the group consisting of SEQ ID NOS:385, 386, 387, 388, 389, 390, 391, 392, 393, 394, 395, 396, 397, 398, 399, 400, 401, 402, 403, 404, 405, 406, 407, 408, 409, 410, 411, 412, 413, 414, 415, 416, 417, 418, 419, 420, 421, 422, 423, 424, 425, 426, 427, 428, 429, 430, 431, 432, 433, 434, 435, 436, 437, 438, 439, 440, 441, 442, 443, 444, 445, 446, 447, 448, 449, 450, 451, 452, 453, 454, 455, 456, 457, 458, 459, 460, 461, 462, 463, 464, 465, 466, 467, 468, 469, 470, 471, 472, 473, 474, 475, 476, 477, 478, 479 and 480;

[0052] b) comparing the methylation status of the at least one cytosine to a threshold value for the biomarker, wherein the threshold value distinguishes between individuals with and without renal cancer, wherein the comparison of the methylation status to the threshold value is predictive of the presence or absence of renal cancer in the individual.

[0053] In some embodiments, the methods comprise:

[0054] a) determining the methylation status of at least one cytosine within a DNA region in a sample from the individual where the DNA region is at least 90%, 91%, 92%, 93%, 94%, 95%, 96%, 97%, 98%, or 99% identical to, or comprises, a sequence selected from the group consisting of SEQ ID NOS:385, 386, 387, 388, 389, 390, 391, 392, 393, 394, 395, 396, 397, 398, 399, 400, 401, 402, 403, 404, 405, 406, 407, 408, 409, 410, 411, 412, 413, 414, 415, 416, 417, 418, 419, 420, 421, 422, 423, 424, 425, 426, 427, 428, 429, 430, 431, 432, 433, 434, 435, 436, 437, 438, 439, 440, 441, 442, 443, 444, 445, 446, 447, 448, 449, 450, 451, 452, 453, 454, 455, 456, 457, 458, 459, 460, 461, 462, 463, 464, 465, 466, 467, 468, 469, 470, 471, 472, 473, 474, 475, 476, 477, 478, 479 and 480;

[0055] b) comparing the methylation status of the at least one cytosine to a threshold value for the biomarker, wherein the threshold value distinguishes between individuals with and without thyroid cancer, wherein the comparison of the methylation status to the threshold value is predictive of the presence or absence of thyroid cancer in the individual.

[0056] With regard to the embodiments, in some embodiments, the determining step comprises determining the methylation status of at least one cytosine in the DNA region corresponding to a nucleotide in a biomarker, wherein the biomarker is at least 90%, 91%, 92%, 93%, 94%, 95%, 96%, 97%, 98%, or 99% identical to, or comprises, a sequence selected from the group consisting of SEQ ID NOS:385, 386, 387, 388, 389, 390, 391, 392, 393, 394, 395, 396, 397, 398, 399, 400, 401, 402, 403, 404, 405, 406, 407, 408, 409, 410, 411, 412, 413, 414, 415, 416, 417, 418, 419, 420, 421, 422, 423, 424, 425, 426, 427, 428, 429, 430, 431, 432, 433, 434, 435, 436, 437, 438, 439, 440, 441, 442, 443, 444, 445, 446, 447, 448, 449, 450, 451, 452, 453, 454, 455, 456, 457, 458, 459, 460, 461, 462, 463, 464, 465, 466, 467, 468, 469, 470, 471, 472, 473, 474, 475, 476, 477, 478, 479 and 480.

[0057] In some embodiments, the determining step comprises determining the methylation status of the DNA region corresponding to a biomarker.

[0058] The sample can be from any body fluid. In some embodiments, the sample is selected from blood serum, blood plasma, fine needle aspirate of the breast, biopsy of the breast, ductal fluid, ductal lavage, feces, urine, sputum, saliva, semen, lavages, or tissue biopsy, such as biopsy of the lung, bronchial lavage or bronchial brushings in the case of lung cancer. In some embodiments, the sample is from a tumor or polyp. In some embodiments, the sample is a biopsy from lung, kidney, liver, ovarian, head, neck, thyroid, bladder, cervical, colon, endometrial, esophageal, prostate or skin tissue. In some embodiments, the sample is from cell scrapes, washings, or resected tissues.

[0059] In some embodiments, the methylation status of at least one cytosine is compared to the methylation status of a control locus. In some embodiments, the control locus is an endogenous control. In some embodiments, the control locus is an exogenous control.

[0060] In some embodiments, the determining step comprises determining the methylation status of at least one cytosine in at least two of the DNA regions.

[0061] In a further aspect, the invention provides computer implemented methods for determining the presence or absence of cancer (including but not limited to cancers of the bladder, breast, cervix, colon, endometrium, esophagus, head and neck, liver, lung(s), ovaries, prostate, rectum, and thyroid, and melanoma) in an individual. In some embodiments, the methods comprise:

[0062] receiving, at a host computer, a methylation value representing the methylation status of at least one cytosine within a DNA region in a sample from the individual where the DNA region is at least 90%, 91%, 92%, 93%, 94%, 95%, 96%, 97%, 98%, or 99% identical to, or comprises, a sequence is selected from the group consisting of SEQ ID NOS:385, 386, 387, 388, 389, 390, 391, 392, 393, 394, 395, 396, 397, 398, 399, 400, 401, 402, 403, 404, 405, 406, 407, 408, 409, 410, 411, 412, 413, 414, 415, 416, 417, 418, 419, 420, 421, 422, 423, 424, 425, 426, 427, 428, 429, 430, 431, 432, 433, 434, 435, 436, 437, 438, 439, 440, 441, 442, 443, 444, 445, 446, 447, 448, 449, 450, 451, 452, 453, 454, 455, 456, 457, 458, 459, 460, 461, 462, 463, 464, 465, 466, 467, 468, 469, 470, 471, 472, 473, 474, 475, 476, 477, 478, 479 and 480; and

[0063] comparing, in the host computer, the methylation value to a threshold value, wherein the threshold value distinguishes between individuals with and without cancer (including but not limited to cancers of the bladder, breast, cervix, colon, endometrium, esophagus, head and neck, liver, lung(s), ovaries, prostate, rectum, and thyroid, and melanoma), wherein the comparison of the methylation value to the threshold value is predictive of the presence or absence of cancer (including but not limited to cancers of the bladder, breast, cervix, colon, endometrium, esophagus, head and neck, liver, lung(s), ovaries, prostate, rectum, and thyroid, and melanoma) in the individual.

[0064] In some embodiments, the receiving step comprises receiving at least two methylation values, the two methylation values representing the methylation status of at least one cytosine biomarkers from two different DNA regions; and

[0065] the comparing step comprises comparing the methylation values to one or more threshold value(s) wherein the threshold value distinguishes between individuals with and without cancer (including but not limited to cancers of the bladder, breast, cervix, colon, endometrium, esophagus, head and neck, liver, lung(s), ovaries, prostate, rectum, and thyroid, and melanoma), wherein the comparison of the methylation value to the threshold value is predictive of the presence or absence of cancer (including but not limited to cancers of the bladder, breast, cervix, colon, endometrium, esophagus, head and neck, liver, lung(s), ovaries, prostate, rectum, and thyroid, and melanoma) in the individual.

[0066] In another aspect, the invention provides computer program products for determining the presence or absence of cancer (including but not limited to cancers of the bladder, breast, cervix, colon, endometrium, esophagus, head and neck, liver, lung(s), ovaries, prostate, rectum, and thyroid, and melanoma) in an individual. In some embodiments, the computer readable products comprise:

[0067] a computer readable medium encoded with program code, the program code including:

[0068] program code for receiving a methylation value representing the methylation status of at least one cytosine within a DNA region in a sample from the individual where the DNA region is at least 90%, 91%, 92%, 93%, 94%, 95%, 96%, 97%, 98%, or 99% identical to, or comprises, a sequence selected from the group consisting of SEQ ID NOS:385, 386, 387, 388, 389, 390, 391, 392, 393, 394, 395, 396, 397, 398, 399, 400, 401, 402, 403, 404, 405, 406, 407, 408, 409, 410, 411, 412, 413, 414, 415, 416, 417, 418, 419, 420, 421, 422, 423, 424, 425, 426, 427, 428, 429, 430, 431, 432, 433, 434, 435, 436, 437, 438, 439, 440, 441, 442, 443, 444, 445, 446, 447, 448, 449, 450, 451, 452, 453, 454, 455, 456, 457, 458, 459, 460, 461, 462, 463, 464, 465, 466, 467, 468, 469, 470, 471, 472, 473, 474, 475, 476, 477, 478, 479 and 480; and

[0069] program code for comparing the methylation value to a threshold value, wherein the threshold value distinguishes between individuals with and without cancer (including but not limited to cancers of the bladder, breast, cervix, colon, endometrium, esophagus, head and neck, liver, lung(s), ovaries, prostate, rectum, and thyroid, and melanoma), wherein the comparison of the methylation value to the threshold value is predictive of the presence or absence of cancer (including but not limited to cancers of the bladder, breast, cervix, colon, endometrium, esophagus, head and neck, liver, lung(s), ovaries, prostate, rectum, and thyroid, and melanoma) in the individual.

[0070] In a further aspect, the invention provides kits for determining the methylation status of at least one biomarker. In some embodiments, the kits comprise:

[0071] a pair of polynucleotides capable of specifically amplifying at least a portion of a DNA region where the DNA region is selected from the group consisting of SEQ ID NOS:385, 386, 387, 388, 389, 390, 391, 392, 393, 394, 395, 396, 397, 398, 399, 400, 401, 402, 403, 404, 405, 406, 407, 408, 409, 410, 411, 412, 413, 414, 415, 416, 417, 418, 419, 420, 421, 422, 423, 424, 425, 426, 427, 428, 429, 430, 431, 432, 433, 434, 435, 436, 437, 438, 439, 440, 441, 442, 443, 444, 445, 446, 447, 448, 449, 450, 451, 452, 453, 454, 455, 456, 457, 458, 459, 460, 461, 462, 463, 464, 465, 466, 467, 468, 469, 470, 471, 472, 473, 474, 475, 476, 477, 478, 479 and 480; and

[0072] a methylation-dependent or methylation sensitive restriction enzyme and/or sodium bisulfite.

[0073] In some embodiments, the pair of polynucleotides are capable of specifically amplifying a biomarker selected from the group consisting of one or more of SEQ ID NOS:289, 290, 291, 292, 293, 294, 295, 296, 297, 298, 299, 300, 301, 302, 303, 304, 305, 306, 307, 308, 309, 310, 311, 312, 313, 314, 315, 316, 317, 318, 319, 320, 321, 322, 323, 324, 325, 326, 327, 328, 329, 330, 331, 332, 333, 334, 335, 336, 337, 338, 339, 340, 341, 342, 343, 344, 345, 346, 347, 348, 349, 350, 351, 352, 353, 354, 355, 356, 357, 358, 359, 360, 361, 362, 363, 364, 365, 366, 367, 368, 369, 370, 371, 372, 373, 374, 375, 376, 377, 378, 379, 380, 381, 382, 383 and 384.

[0074] In some embodiments, the kits comprise at least two pairs of polynucleotides, wherein each pair is capable of specifically amplifying at least a portion of a different DNA region.

[0075] In some embodiments, the kits further comprise a detectably labeled polynucleotide probe that specifically detects the amplified biomarker in a real time amplification reaction.

[0076] In a further aspect, the invention provides kits for determining the methylation status of at least one biomarker. In some embodiments, the kits comprise:

[0077] sodium bisulfite and polynucleotides to quantify the presence of the converted methylated and/or the converted unmethylated sequence of at least one cytosine from a DNA region that is selected from the group consisting of SEQ ID NOS:385, 386, 387, 388, 389, 390, 391, 392, 393, 394, 395, 396, 397, 398, 399, 400, 401, 402, 403, 404, 405, 406, 407, 408, 409, 410, 411, 412, 413, 414, 415, 416, 417, 418, 419, 420, 421, 422, 423, 424, 425, 426, 427, 428, 429, 430, 431, 432, 433, 434, 435, 436, 437, 438, 439, 440, 441, 442, 443, 444, 445, 446, 447, 448, 449, 450, 451, 452, 453, 454, 455, 456, 457, 458, 459, 460, 461, 462, 463, 464, 465, 466, 467, 468, 469, 470, 471, 472, 473, 474, 475, 476, 477, 478, 479 and 480.

[0078] In a further aspect, the invention provides kits for determining the methylation status of at least one biomarker. In some embodiments, the kits comprise:

[0079] sodium bisulfite, primers and adapters for whole genome amplification, and polynucleotides to quantify the presence of the converted methylated and/or the converted unmethylated sequence of at least one cytosine from a DNA region that is selected from the group consisting of SEQ ID NOS:385, 386, 387, 388, 389, 390, 391, 392, 393, 394, 395, 396, 397, 398, 399, 400, 401, 402, 403, 404, 405, 406, 407, 408, 409, 410, 411, 412, 413, 414, 415, 416, 417, 418, 419, 420, 421, 422, 423, 424, 425, 426, 427, 428, 429, 430, 431, 432, 433, 434, 435, 436, 437, 438, 439, 440, 441, 442, 443, 444, 445, 446, 447, 448, 449, 450, 451, 452, 453, 454, 455, 456, 457, 458, 459, 460, 461, 462, 463, 464, 465, 466, 467, 468, 469, 470, 471, 472, 473, 474, 475, 476, 477, 478, 479 and 480.

[0080] In another aspect, the methods provide kits for determining the methylation status of at least one biomarker. In some embodiments, the kits comprise:

[0081] a methylation sensing restriction enzymes, primers and adapters for whole genome amplification, and polynucleotides to quantify the number of copies of at least a portion of a DNA region where the DNA region is at least 90%, 91%, 92%, 93%, 94%, 95%, 96%, 97%, 98%, or 99% identical to, or comprises, a sequence selected from the group consisting of SEQ ID NO: 385, 386, 387, 388, 389, 390, 391, 392, 393, 394, 395, 396, 397, 398, 399, 400, 401, 402, 403, 404, 405, 406, 407, 408, 409, 410, 411, 412, 413, 414, 415, 416, 417, 418, 419, 420, 421, 422, 423, 424, 425, 426, 427, 428, 429, 430, 431, 432, 433, 434, 435, 436, 437, 438, 439, 440, 441, 442, 443, 444, 445, 446, 447, 448, 449, 450, 451, 452, 453, 454, 455, 456, 457, 458, 459, 460, 461, 462, 463, 464, 465, 466, 467, 468, 469, 470, 471, 472, 473, 474, 475, 476, 477, 478, 479 and 480.

[0082] In a further aspect, the invention provides kits for determining the methylation status of at least one biomarker. In some embodiments, the kits comprise:

[0083] a methylation sensing binding moiety and polynucleotides to quantify the number of copies of at least a portion of a DNA region where the DNA region is at least 90%, 91%, 92%, 93%, 94%, 95%, 96%, 97%, 98%, or 99% identical to, or comprises, a sequence selected from the group consisting of SEQ ID NOS:385, 386, 387, 388, 389, 390, 391, 392, 393, 394, 395, 396, 397, 398, 399, 400, 401, 402, 403, 404, 405, 406, 407, 408, 409, 410, 411, 412, 413, 414, 415, 416, 417, 418, 419, 420, 421, 422, 423, 424, 425, 426, 427, 428, 429, 430, 431, 432, 433, 434, 435, 436, 437, 438, 439, 440, 441, 442, 443, 444, 445, 446, 447, 448, 449, 450, 451, 452, 453, 454, 455, 456, 457, 458, 459, 460, 461, 462, 463, 464, 465, 466, 467, 468, 469, 470, 471, 472, 473, 474, 475, 476, 477, 478, 479 and 480.

### DEFINITIONS

[0084] “Methylation” refers to cytosine methylation at positions C5 or N4 of cytosine, the N6 position of adenine or other types of nucleic acid methylation. In vitro amplified DNA is unmethylated because in vitro DNA amplification methods do not retain the methylation pattern of the amplification template. However, “unmethylated DNA” or “methylated DNA” can also refer to amplified DNA whose original template was unmethylated or methylated, respectively.

[0085] A “methylation profile” refers to a set of data representing the methylation states of one or more loci within a molecule of DNA from e.g., the genome of an individual or cells or tissues from an individual. The profile can indicate the methylation state of every base in an individual, can comprise information regarding a subset of the base pairs (e.g., the methylation state of specific restriction enzyme recognition sequence) in a genome, or can comprise information regarding regional methylation density of each locus.

[0086] “Methylation status” refers to the presence, absence and/or quantity of methylation at a particular nucleotide, or nucleotides within a portion of DNA. The methylation status of a particular DNA sequence (e.g., a DNA biomarker or DNA region as described herein) can indicate the methylation state of every base in the sequence or can indicate the methylation state of a subset of the base pairs (e.g., of cytosines or the methylation state of one or more specific restriction enzyme recognition sequences) within the sequence, or can indicate information regarding regional methylation density within the sequence without providing precise information of where in the sequence the methylation occurs. The methylation status can optionally be represented or indicated by a “methylation value.” A methylation value can be generated, for example, by quantifying the amount of intact DNA present following restriction digestion with a methylation dependent restriction enzyme. In this example, if a particular sequence in the DNA is quantified using quantitative PCR, an amount of template DNA approximately equal to a mock treated control indicates the sequence is not highly methylated whereas an amount of template substantially less than occurs in the mock treated sample indicates the presence of methylated DNA at the sequence. Accordingly, a value, i.e., a methylation value from the above described example represents the methylation status and can thus be used as a quantitative indicator of methylation status. This is of particular use when it is desirable to compare the methylation status of a sequence in a sample to a threshold value.

[0087] A “methylation-dependent restriction enzyme” refers to a restriction enzyme that cleaves or digests DNA at or in proximity to a methylated recognition sequence, but does not cleave DNA at or near the same sequence when the recognition sequence is not methylated. Methylation-dependent restriction enzymes include those that cut at a methylated recognition sequence (e.g., DpnI) and enzymes that cut at a sequence near but not at the recognition sequence (e.g., McrBC). For example, McrBC's recognition sequence is 5′ RmC (N40-3000) RmC 3′ where “R” is a purine and “mC” is a methylated cytosine and “N40-3000” indicates the distance between the two RmC half sites for which a restriction event has been observed. McrBC generally cuts close to one half-site or the other, but cleavage positions are typically distributed over several base pairs, approximately 30 base pairs from the methylated base. McrBC sometimes cuts 3′ of both half sites, sometimes 5′ of both half sites, and sometimes between the two sites. Exemplary methylation-dependent restriction enzymes include, e.g., McrBC (see, e.g., U.S. Pat. No. 5,405,760), McrA, MrrA, BisI, GlaI and DpnI. One of skill in the art will appreciate that any methylation-dependent restriction enzyme, including homologs and orthologs of the restriction enzymes described herein, is also suitable for use in the present invention.

[0088] A “methylation-sensitive restriction enzyme” refers to a restriction enzyme that cleaves DNA at or in proximity to an unmethylated recognition sequence but does not cleave at or in proximity to the same sequence when the recognition sequence is methylated. Exemplary methylation-sensitive restriction enzymes are described in, e.g., McClelland et al., Nucleic Acids Res. 22 (17):3640-59 (1994) and http://rebase.neb.com. Suitable methylation-sensitive restriction enzymes that do not cleave DNA at or near their recognition sequence when a cytosine within the recognition sequence is methylated at position C⁵ include, e.g., Aat II, Aci I, Acl I, Age I, Alu I, Asc I, Ase I, AsiS I, Bbe I, BsaA I, BsaH I, BsiE I, BsiW I, BsrF I, BssH II, BssK I, BstB I, BstN I, BstU I, Cla I, Eae I, Eag I, Fau I, Fse I, Hha I, HinP1 I, HinC II, Hpa II, Hpy99 I, HpyCH4 IV, Kas I, Mbo I, Mlu I, MapA1 I, Msp I, Nae I, Nar I, Not I, Pml I, Pst I, Pvu I, Rsr II, Sac II, Sap I, Sau3A I, Sfl I, Sfo I, SgrA I, Sma I, SnaB I, Tsc I, Xma I, and Zra I. Suitable methylation-sensitive restriction enzymes that do not cleave DNA at or near their recognition sequence when an adenosine within the recognition sequence is methylated at position N⁶ include, e.g., Mbo I. One of skill in the art will appreciate that any methylation-sensitive restriction enzyme, including homologs and orthologs of the restriction enzymes described herein, is also suitable for use in the present invention. One of skill in the art will further appreciate that a methylation-sensitive restriction enzyme that fails to cut in the presence of methylation of a cytosine at or near its recognition sequence may be insensitive to the presence of methylation of an adenosine at or near its recognition sequence. Likewise, a methylation-sensitive restriction enzyme that fails to cut in the presence of methylation of an adenosine at or near its recognition sequence may be insensitive to the presence of methylation of a cytosine at or near its recognition sequence. For example, Sau3AI is sensitive (i.e., fails to cut) to the presence of a methylated cytosine at or near its recognition sequence, but is insensitive (i.e., cuts) to the presence of a methylated adenosine at or near its recognition sequence. One of skill in the art will also appreciate that some methylation-sensitive restriction enzymes are blocked by methylation of bases on one or both strands of DNA encompassing of their recognition sequence, while other methylation-sensitive restriction enzymes are blocked only by methylation on both strands, but can cut if a recognition site is hemi-methylated.

[0089] A “threshold value that distinguishes between individuals with and without” a particular disease refers to a value or range of values of a particular measurement that can be used to distinguish between samples from individuals with the disease and samples without the disease. Ideally, there is a threshold value or values that absolutely distinguishes between the two groups (i.e., values from the diseased group are always on one side (e.g., higher) of the threshold value and values from the healthy, non-diseased group are on the other side (e.g., lower) of the threshold value). However, in many instances, threshold values do not absolutely distinguish between diseased and non-diseased samples (for example, when there is some overlap of values generated from diseased and non-diseased samples).

[0090] The phrase “corresponding to a nucleotide in a biomarker” refers to a nucleotide in a DNA region that aligns with the same nucleotide (e.g., a cytosine) in a biomarker sequence. Generally, as described herein, biomarker sequences are subsequences of (i.e., have 100% identity with) the DNA regions. Sequence comparisons can be performed using any BLAST including BLAST 2.2 algorithm with default parameters, described in Altschul et al., Nuc. Acids Res. 25:3389 3402 (1977) and Altschul et al., J. Mol. Biol. 215:403 410 (1990), respectively.

[0091] “Sensitivity” of a given biomarker refers to the percentage of tumor samples that report a DNA methylation value above a threshold value that distinguishes between tumor and non-tumor samples. The percentage is calculated as follows:

$$Sensitivity = [ \frac{( the number of tumor samples above the threshold )}{( the total number of tumor samples tested )} ] \times 100$$

[0092] The equation may also be stated as follows:

$$Sensitivity = [ \frac{( the number of true positive samples )}{\begin{matrix}( the number of true positive samples ) + \\ ( the number of false negative samples )\end{matrix}} ] \times 100$$

where true positive is defined as a histology-confirmed tumor sample that reports a DNA methylation value above the threshold value (i.e. the range associated with disease), and false negative is defined as a histology-confirmed tumor sample that reports a DNA methylation value below the threshold value (i.e. the range associated with no disease). The value of sensitivity, therefore, reflects the probability that a DNA methylation measurement for a given biomarker obtained from a known diseased sample will be in the range of disease-associated measurements. As defined here, the clinical relevance of the calculated sensitivity value represents an estimation of the probability that a given biomarker would detect the presence of a clinical condition when applied to a patient with that condition.

[0093] “Specificity” of a given biomarker refers to the percentage of non-tumor samples that report a DNA methylation value below a threshold value that distinguishes between tumor and non-tumor samples. The percentage is calculated as follows:

$$Specificity = [ \frac{( the number of non \text{-} tumor samples below the threshold )}{( the total number of non \text{-} tumor samples tested )} ] \times 100$$

[0094] The equation may also be stated as follows:

$$Specificity = [ \frac{( the number of true negative samples )}{\begin{matrix}( the number of true negative samples ) + \\ ( the number of false positive samples )\end{matrix}} ] \times 100$$

where true negative is defined as a histology-confirmed non-tumor sample that reports a DNA methylation value below the threshold value (i.e. the range associated with no disease), and false positive is defined as a histology-confirmed non-tumor sample that reports DNA methylation value above the threshold value (i.e. the range associated with disease). The value of specificity, therefore, reflects the probability that a DNA methylation measurement for a given biomarker obtained from a known non-diseased sample will be in the range of non-disease associated measurements. As defined here, the clinical relevance of the calculated specificity value represents an estimation of the probability that a given biomarker would detect the absence of a clinical condition when applied to a patient without that condition.

[0095] Software for performing BLAST analyses is publicly available through the National Center for Biotechnology Information. This algorithm involves first identifying high scoring sequence pairs (HSPs) by identifying short words of length W in the query sequence, which either match or satisfy some positive-valued threshold score T when aligned with a word of the same length in a database sequence. T is referred to as the neighborhood word score threshold (Altschul et al., supra). These initial neighborhood word hits act as seeds for initiating searches to find longer HSPs containing them. The word hits are extended in both directions along each sequence for as far as the cumulative alignment score can be increased. Cumulative scores are calculated using, for nucleotide sequences, the parameters M (reward score for a pair of matching residues; always >0) and N (penalty score for mismatching residues; always <0). For amino acid sequences, a scoring matrix is used to calculate the cumulative score. Extension of the word hits in each direction are halted when: the cumulative alignment score falls off by the quantity X from its maximum achieved value; the cumulative score goes to zero or below, due to the accumulation of one or more negative-scoring residue alignments; or the end of either sequence is reached. The BLAST algorithm parameters W, T, and X determine the sensitivity and speed of the alignment. The BLASTN program (for nucleotide sequences) uses as defaults a wordlength (W) of 11, an expectation (E) of 10, M=5, N=−4 and a comparison of both strands. For amino acid sequences, the BLASTP program uses as defaults a wordlength of 3, and expectation (E) of 10, and the BLOSUM62 scoring matrix (see Henikoff & Henikoff, Proc. Natl. Acad. Sci. USA 89:10915 (1989)) alignments (B) of 50, expectation (E) of 10, M=5, N=−4, and a comparison of both strands.

[0096] As used herein, the terms “nucleic acid,” “polynucleotide” and “oligonucleotide” refer to nucleic acid regions, nucleic acid segments, primers, probes, amplicons and oligomer fragments. The terms are not limited by length and are generic to linear polymers of polydeoxyribonucleotides (containing 2-deoxy-D-ribose), polyribonucleotides (containing D-ribose), and any other N-glycoside of a purine or pyrimidine base, or modified purine or pyrimidine bases. These terms include double- and single-stranded DNA, as well as double- and single-stranded RNA.

[0097] A nucleic acid, polynucleotide or oligonucleotide can comprise, for example, phosphodiester linkages or modified linkages including, but not limited to phosphotriester, phosphoramidate, siloxane, carbonate, carboxymethylester, acetamidate, carbamate, thioether, bridged phosphoramidate, bridged methylene phosphonate, phosphorothioate, methylphosphonate, phosphorodithioate, bridged phosphorothioate or sulfone linkages, and combinations of such linkages.

[0098] A nucleic acid, polynucleotide or oligonucleotide can comprise the five biologically occurring bases (adenine, guanine, thymine, cytosine and uracil) and/or bases other than the five biologically occurring bases. For example, a polynucleotide of the invention can contain one or more modified, non-standard, or derivatized base moieties, including, but not limited to, N⁶-methyl-adenine, N⁶-tert-butyl-benzyl-adenine, imidazole, substituted imidazoles, 5-fluorouracil, 5-bromouracil, 5-chlorouracil, 5-iodouracil, hypoxanthine, xanthine, 4-acetylcytosine, 5-(carboxyhydroxymethyl)uracil, 5-carboxymethylaminomethyl-2-thiouridine, 5-carboxymethylaminomethyluracil, dihydrouracil, beta-D-galactosylqueosine, inosine, N⁶-isopentenyladenine, 1-methylguanine, 1-methylinosine, 2,2-dimethylguanine, 2-methyladenine, 2-methylguanine, 3-methylcytosine, 5-methylcytosine, N⁶-methyladenine, 7-methylguanine, 5-methylaminomethyluracil, 5-methoxyaminomethyl-2-thiouracil, beta-D mannosylqueosine, 5′-methoxycarboxymethyluracil, 5-methoxyuracil, 2-methylthio-N-6-isopentenyladenine, uracil-5-oxyacetic acid (v), wybutoxosine, pseudouracil, queosine, 2-thiocytosine, 5-methyl-2-thiouracil, 2-thiouracil, 4-thiouracil, uracil-5-oxyacetic acidmethylester, 3-(3-amino-3-N-2-carboxypropyl) uracil, (acp3)w, 2,6-diaminopurine, and 5-propynyl pyrimidine. Other examples of modified, non-standard, or derivatized base moieties may be found in U.S. Pat. Nos. 6,001,611; 5,955,589; 5,844,106; 5,789,562; 5,750,343; 5,728,525; and 5,679,785.

[0099] Furthermore, a nucleic acid, polynucleotide or oligonucleotide can comprise one or more modified sugar moieties including, but not limited to, arabinose, 2-fluoroarabinose, xylulose, and a hexose.

### BRIEF DESCRIPTION OF THE DRAWINGS

### I. Introduction

[0100] The present invention is based, in part, on the discovery that sequences in certain DNA regions are methylated in cancer cells, but not normal cells. Specifically, the inventors have found that methylation of biomarkers within the DNA regions described herein are associated with various types of cancer.

[0101] In view of this discovery, the inventors have recognized that methods for detecting the biomarker sequences and DNA regions comprising the biomarker sequences as well as sequences adjacent to the biomarkers that contain a significant amount of CG subsequences, methylation of the DNA regions, and/or expression of the genes regulated by the DNA regions can be used to detect cancer cells. Detecting cancer cells allows for diagnostic tests that detect disease, assess the risk of contracting disease, determining a predisposition to disease, stage disease, diagnose disease, monitor disease, and/or aid in the selection of treatment for a person with disease.

### II. Methylation Biomarkers

[0102] In some embodiments, the presence or absence or quantity of methylation of the chromosomal DNA within a DNA region or portion thereof (e.g., at least one cytosine) selected from SEQ ID NOS:385, 386, 387, 388, 389, 390, 391, 392, 393, 394, 395, 396, 397, 398, 399, 400, 401, 402, 403, 404, 405, 406, 407, 408, 409, 410, 411, 412, 413, 414, 415, 416, 417, 418, 419, 420, 421, 422, 423, 424, 425, 426, 427, 428, 429, 430, 431, 432, 433, 434, 435, 436, 437, 438, 439, 440, 441, 442, 443, 444, 445, 446, 447, 448, 449, 450, 451, 452, 453, 454, 455, 456, 457, 458, 459, 460, 461, 462, 463, 464, 465, 466, 467, 468, 469, 470, 471, 472, 473, 474, 475, 476, 477, 478, 479 and 480 is detected. Portions of the DNA regions described herein will comprise at least one potential methylation site (i.e., a cytosine) and can in some embodiments generally comprise 2, 3, 4, 5, 10, or more potential methylation sites. In some embodiments, the methylation status of all cytosines within at least 20, 50, 100, 200, 500 or more contiguous base pairs of the DNA region are determined.

[0103] In some embodiments, the methylation of more than one DNA region (or portion thereof) is detected. In some embodiments, the methylation status of 1, 2, 3, 4, 5, 6, 7, 8, 9, 10, 11, 12, 13, 14, 15, 16, 17, 18, 19, 20, 21, 22, 23, 24, 25, 26, 27, 28, 29, 30, 31, 32, 33, 34, 35, 36, 37, 38, 39, 40, 41, 42, 43, 44, 45, 46, 47, 48, 49, 50, 51, 52, 53, 54, 55, 56, 57, 58, 59, 60, 61, 62, 63, 64, 65, 66, 67, 68, 69, 70, 71, 72, 73, 74, 75, 76, 77, 78, 79, 80, 81, 82, 83, 84, 85, 86, 87, 88, 89, 90, 91, 92, 93, 94, 95, or 96 of the DNA regions is determined.

[0104] In some embodiments of the invention, the methylation of a DNA region or portion thereof is determined and then normalized (e.g., compared) to the methylation of a control locus. Typically the control locus will have a known, relatively constant, methylation status. For example, the control sequence can be previously determined to have no, some or a high amount of methylation, thereby providing a relative constant value to control for error in detection methods, etc., unrelated to the presence or absence of cancer. In some embodiments, the control locus is endogenous, i.e., is part of the genome of the individual sampled. For example, in mammalian cells, the testes-specific histone 2B gene (hTH2B in human) gene is known to be methylated in all somatic tissues except testes. Alternatively, the control locus can be an exogenous locus, i.e., a DNA sequence spiked into the sample in a known quantity and having a known methylation status.

[0105] A DNA region comprises a nucleic acid including one or more methylation sites of interest (e.g., a cytosine, a “microarray feature,” or an amplicon amplified from select primers) and flanking nucleic acid sequences (i.e., “wingspan”) of up to 4 kilobases (kb) in either or both of the 3′ or 5′ direction from the amplicon. This range corresponds to the lengths of DNA fragments obtained by randomly fragmenting the DNA before screening for differential methylation between DNA in two or more samples (e.g., carrying out methods used to initially identify differentially methylated sequences as described in the Examples, below). In some embodiments, the wingspan of the one or more DNA regions is about 0.5 kb, 0.75 kb, 1.0 kb, 1.5 kb, 2.0 kb, 2.5 kb, 3.0 kb, 3.5 kb or 4.0 kb in both 3′ and 5′ directions relative to the sequence represented by the microarray feature.

[0106] The methylation sites in a DNA region can reside in non-coding transcriptional control sequences (e.g., promoters, enhancers, etc.) or in coding sequences, including introns and exons of the designated genes listed in Tables 1-4 and in the section, “INFORMAL SEQUENCE LISTING.” In some embodiments, the methods comprise detecting the methylation status in the promoter regions (e.g., comprising the nucleic acid sequence that is about 1.0 kb, 1.5 kb, 2.0 kb, 2.5 kb, 3.0 kb, 3.5 kb or 4.0 kb 5′ from the transcriptional start site through to the transcriptional start site) of one or more of the genes identified in Tables 1-4 and in the section, “INFORMAL SEQUENCE LISTING.”

[0107] The DNA regions of the invention also include naturally occurring variants, including for example, variants occurring in different subject populations and variants arising from single nucleotide polymorphisms (SNPs). SNPs encompass insertions and deletions of varying size and simple sequence repeats, such as dinucleotides and trinucleotide repeats. Variants include nucleic acid sequences from the same DNA region (e.g., as set forth in Table 4 and in section “INFORMAL SEQUENCE LISTING”) sharing at least 90%, 95%, 98%, 99% sequence identity, i.e., having one or more deletions, additions, substitutions, inverted sequences, etc., relative to the DNA regions described herein.

### III. Methods for Determining Methylation

[0108] Any method for detecting DNA methylation can be used in the methods of the present invention.

[0109] In some embodiments, methods for detecting methylation include randomly shearing or randomly fragmenting the genomic DNA, cutting the DNA with a methylation-dependent or methylation-sensitive restriction enzyme and subsequently selectively identifying and/or analyzing the cut or uncut DNA. Selective identification can include, for example, separating cut and uncut DNA (e.g., by size) and quantifying a sequence of interest that was cut or, alternatively, that was not cut. See, e.g., U.S. Pat. No. 7,186,512. Alternatively, the method can encompass amplifying intact DNA after restriction enzyme digestion, thereby only amplifying DNA that was not cleaved by the restriction enzyme in the area amplified. See, e.g., U.S. patent application Ser. Nos. 10/971,986; 11/071,013; and 10/971,339. In some embodiments, amplification can be performed using primers that are gene specific. Alternatively, adaptors can be added to the ends of the randomly fragmented DNA, the DNA can be digested with a methylation-dependent or methylation-sensitive restriction enzyme, intact DNA can be amplified using primers that hybridize to the adaptor sequences. In this case, a second step can be performed to determine the presence, absence or quantity of a particular gene in an amplified pool of DNA. In some embodiments, the DNA is amplified using real-time, quantitative PCR.

[0110] In some embodiments, the methods comprise quantifying the average methylation density in a target sequence within a population of genomic DNA. In some embodiments, the method comprises contacting genomic DNA with a methylation-dependent restriction enzyme or methylation-sensitive restriction enzyme under conditions that allow for at least some copies of potential restriction enzyme cleavage sites in the locus to remain uncleaved; quantifying intact copies of the locus; and comparing the quantity of amplified product to a control value representing the quantity of methylation of control DNA, thereby quantifying the average methylation density in the locus compared to the methylation density of the control DNA.

[0111] The quantity of methylation of a locus of DNA can be determined by providing a sample of genomic DNA comprising the locus, cleaving the DNA with a restriction enzyme that is either methylation-sensitive or methylation-dependent, and then quantifying the amount of intact DNA or quantifying the amount of cut DNA at the DNA locus of interest. The amount of intact or cut DNA will depend on the initial amount of genomic DNA containing the locus, the amount of methylation in the locus, and the number (i.e., the fraction) of nucleotides in the locus that are methylated in the genomic DNA. The amount of methylation in a DNA locus can be determined by comparing the quantity of intact DNA or cut DNA to a control value representing the quantity of intact DNA or cut DNA in a similarly-treated DNA sample. The control value can represent a known or predicted number of methylated nucleotides. Alternatively, the control value can represent the quantity of intact or cut DNA from the same locus in another (e.g., normal, non-diseased) cell or a second locus.

[0112] By using at least one methylation-sensitive or methylation-dependent restriction enzyme under conditions that allow for at least some copies of potential restriction enzyme cleavage sites in the locus to remain uncleaved and subsequently quantifying the remaining intact copies and comparing the quantity to a control, average methylation density of a locus can be determined. If the methylation-sensitive restriction enzyme is contacted to copies of a DNA locus under conditions that allow for at least some copies of potential restriction enzyme cleavage sites in the locus to remain uncleaved, then the remaining intact DNA will be directly proportional to the methylation density, and thus may be compared to a control to determine the relative methylation density of the locus in the sample. Similarly, if a methylation-dependent restriction enzyme is contacted to copies of a DNA locus under conditions that allow for at least some copies of potential restriction enzyme cleavage sites in the locus to remain uncleaved, then the remaining intact DNA will be inversely proportional to the methylation density, and thus may be compared to a control to determine the relative methylation density of the locus in the sample. Such assays are disclosed in, e.g., U.S. patent application Ser. No. 10/971,986.

[0113] Kits for the above methods can include, e.g., one or more of methylation-dependent restriction enzymes, methylation-sensitive restriction enzymes, amplification (e.g., PCR) reagents, probes and/or primers.

[0114] Quantitative amplification methods (e.g., quantitative PCR or quantitative linear amplification) can be used to quantify the amount of intact DNA within a locus flanked by amplification primers following restriction digestion. Methods of quantitative amplification are disclosed in, e.g., U.S. Pat. Nos. 6,180,349; 6,033,854; and 5,972,602, as well as in, e.g., Gibson et al., Genome Research 6:995-1001 (1996); DeGraves, et al., Biotechniques 34 (1):106-10, 112-5 (2003); Deiman B, et al., Mol Biotechnol. 20 (2):163-79 (2002). Amplifications may be monitored in “real time.”

[0115] Additional methods for detecting DNA methylation can involve genomic sequencing before and after treatment of the DNA with bisulfite. See, e.g., Frommer et al., Proc. Natl. Acad. Sci. USA 89:1827-1831 (1992). When sodium bisulfite is contacted to DNA, unmethylated cytosine is converted to uracil, while methylated cytosine is not modified.

[0116] In some embodiments, restriction enzyme digestion of PCR products amplified from bisulfite-converted DNA is used to detect DNA methylation. See, e.g., Sadri & Hornsby, Nucl. Acids Res. 24:5058-5059 (1996); Xiong & Laird, Nucleic Acids Res. 25:2532-2534 (1997).

[0117] In some embodiments, a MethyLight assay is used alone or in combination with other methods to detect DNA methylation (see, Eads et al., Cancer Res. 59:2302-2306 (1999)). Briefly, in the MethyLight process genomic DNA is converted in a sodium bisulfite reaction (the bisulfite process converts unmethylated cytosine residues to uracil). Amplification of a DNA sequence of interest is then performed using PCR primers that hybridize to CpG dinucleotides. By using primers that hybridize only to sequences resulting from bisulfite conversion of unmethylated DNA, (or alternatively to methylated sequences that are not converted) amplification can indicate methylation status of sequences where the primers hybridize. Similarly, the amplification product can be detected with a probe that specifically binds to a sequence resulting from bisulfite treatment of a unmethylated (or methylated) DNA. If desired, both primers and probes can be used to detect methylation status. Thus, kits for use with MethyLight can include sodium bisulfite as well as primers or detectably-labeled probes (including but not limited to Taqman or molecular beacon probes) that distinguish between methylated and unmethylated DNA that have been treated with bisulfite. Other kit components can include, e.g., reagents necessary for amplification of DNA including but not limited to, PCR buffers, deoxynucleotides; and a thermostable polymerase.

[0118] In some embodiments, a Ms-SNuPE (Methylation-sensitive Single Nucleotide Primer Extension) reaction is used alone or in combination with other methods to detect DNA methylation (see, Gonzalgo & Jones, Nucleic Acids Res. 25:2529-2531 (1997)). The Ms-SNuPE technique is a quantitative method for assessing methylation differences at specific CpG sites based on bisulfite treatment of DNA, followed by single-nucleotide primer extension (Gonzalgo & Jones, supra). Briefly, genomic DNA is reacted with sodium bisulfite to convert unmethylated cytosine to uracil while leaving 5-methylcytosine unchanged. Amplification of the desired target sequence is then performed using PCR primers specific for bisulfite-converted DNA, and the resulting product is isolated and used as a template for methylation analysis at the CpG site(s) of interest.

[0119] Typical reagents (e.g., as might be found in a typical Ms-SNuPE-based kit) for Ms-SNuPE analysis can include, but are not limited to: PCR primers for specific gene (or methylation-altered DNA sequence or CpG island); optimized PCR buffers and deoxynucleotides; gel extraction kit; positive control primers; Ms-SNuPE primers for a specific gene; reaction buffer (for the Ms-SNuPE reaction); and detectably-labeled nucleotides. Additionally, bisulfite conversion reagents may include: DNA denaturation buffer; sulfonation buffer; DNA recovery regents or kit (e.g., precipitation, ultrafiltration, affinity column); desulfonation buffer; and DNA recovery components.

[0120] In some embodiments, a methylation-specific PCR (“MSP”) reaction is used alone or in combination with other methods to detect DNA methylation. An MSP assay entails initial modification of DNA by sodium bisulfite, converting all unmethylated, but not methylated, cytosines to uracil, and subsequent amplification with primers specific for methylated versus unmethylated DNA. See, Herman et al., Proc. Natl. Acad. Sci. USA 93:9821-9826, (1996); U.S. Pat. No. 5,786,146.

[0121] Additional methylation detection methods include, but are not limited to, methylated CpG island amplification (see, Toyota et al., Cancer Res. 59:2307-12 (1999)) and those described in, e.g., U.S. Patent Publication 2005/0069879; Rein, et al. Nucleic Acids Res. 26 (10): 2255-64 (1998); Olek, et al. Nat Genet. 17 (3): 275-6 (1997); and PCT Publication No. WO 00/70090.

[0122] It is well known that methylation of genomic DNA can affect expression (transcription and/or translation) of nearby gene sequences. Therefore, in some embodiments, the methods include the step of correlating the methylation status of at least one cytosine in a DNA region with the expression of nearby coding sequences, as described in Tables 1-4 and in section “INFORMAL SEQUENCE LISTING.” For example, expression of gene sequences within about 1.0 kb, 1.5 kb, 2.0 kb, 2.5 kb, 3.0 kb, 3.5 kb or 4.0 kb in either the 3′ or 5′ direction from the cytosine of interest in the DNA region can be detected. Methods for measuring transcription and/or translation of a particular gene sequence are well known in the art. See, for example, Ausubel, Current Protocols in Molecular Biology, 1987-2006, John Wiley & Sons; and Sambrook and Russell, Molecular Cloning: A Laboratory Manual, 3rd Edition, 2000, Cold Spring Harbor Laboratory Press. In some embodiments, the gene or protein expression of a gene in Tables 1-4 and in section “INFORMAL SEQUENCE LISTING” is compared to a control, for example, the methylation status in the DNA region and/or the expression of a nearby gene sequence from a sample from an individual known to be negative for cancer or known to be positive for cancer, or to an expression level that distinguishes between cancer and noncancer states. Such methods, like the methods of detecting methylation described herein, are useful in providing diagnosis, prognosis, etc., of cancer.

[0123] In some embodiments, the methods further comprise the step of correlating the methylation status and expression of one or more of the gene regions identified in Tables 1-4 and in section “INFORMAL SEQUENCE LISTING.”

### IV. Cancer Detection

[0124] The present biomarkers and methods can be used in the diagnosis, prognosis, classification, prediction of disease risk, detection of recurrence of disease, and selection of treatment of a number of types of cancers. A cancer at any stage of progression can be detected, such as primary, metastatic, and recurrent cancers. Information regarding numerous types of cancer can be found, e.g., from the American Cancer Society (available on the worldwide web at cancer.org), or from, e.g., Harrison's Principles of Internal Medicine, Kaspar, et al., eds., 16th Edition, 2005, McGraw-Hill, Inc. Exemplary cancers that can be detected include lung, breast, renal, liver, ovarian, head and neck, thyroid, bladder, cervical, colon, endometrial, esophageal, prostate cancer or melanoma.

[0125] The present invention provides methods for determining whether or not a mammal (e.g., a human) has cancer, whether or not a biological sample taken from a mammal contains cancerous cells, estimating the risk or likelihood of a mammal developing cancer, classifying cancer types and stages, monitoring the efficacy of anti-cancer treatment, or selecting the appropriate anti-cancer treatment in a mammal with cancer. Such methods are based on the discovery that cancer cells have a different methylation status than normal cells in the DNA regions described in the invention. Accordingly, by determining whether or not a cell contains differentially methylated sequences in the DNA regions as described herein, it is possible to determine whether or not the cell is cancerous.

[0126] In numerous embodiments of the present invention, the presence of methylated nucleotides in the diagnostic biomarker sequences of the invention is detected in a biological sample, thereby detecting the presence or absence of cancerous cells in the biological sample.

[0127] In some embodiments, the biological sample comprises a tissue sample from a tissue suspected of containing cancerous cells. For example, in an individual suspected of having cancer, breast tissue, lymph tissue, lung tissue, brain tissue, or blood can be evaluated. Alternatively, lung, renal, liver, ovarian, head and neck, thyroid, bladder, cervical, colon, endometrial, esophageal, prostate, or skin tissue can be evaluated. The tissue or cells can be obtained by any method known in the art including, e.g., by surgery, biopsy, phlebotomy, swab, nipple discharge, stool, etc. In other embodiments, a tissue sample known to contain cancerous cells, e.g., from a tumor, will be analyzed for the presence or quantity of methylation at one or more of the diagnostic biomarkers of the invention to determine information about the cancer, e.g., the efficacy of certain treatments, the survival expectancy of the individual, etc. In some embodiments, the methods will be used in conjunction with additional diagnostic methods, e.g., detection of other cancer biomarkers, etc.

[0128] Genomic DNA samples can be obtained by any means known in the art. In cases where a particular phenotype or disease is to be detected, DNA samples should be prepared from a tissue of interest, or as appropriate, from blood. For example, DNA can be prepared from biopsy tissue to detect the methylation state of a particular locus associated with cancer. The nucleic acid-containing specimen used for detection of methylated loci (see, e.g., Ausubel et al., Current Protocols in Molecular Biology (1995 supplement)) may be from any source and may be extracted by a variety of techniques such as those described by Ausubel et al., Current Protocols in Molecular Biology (1995) or Sambrook et al., Molecular Cloning, A Laboratory Manual (3rd ed. 2001).

[0129] The methods of the invention can be used to evaluate individuals known or suspected to have cancer or as a routine clinical test, i.e., in an individual not necessarily suspected to have cancer. Further diagnostic assays can be performed to confirm the status of cancer in the individual.

[0130] Further, the present methods may be used to assess the efficacy of a course of treatment. For example, the efficacy of an anti-cancer treatment can be assessed by monitoring DNA methylation of the biomarker sequences described herein over time in a mammal having cancer. For example, a reduction or absence of methylation in any of the diagnostic biomarkers of the invention in a biological sample taken from a mammal following a treatment, compared to a level in a sample taken from the mammal before, or earlier in, the treatment, indicates efficacious treatment.

[0131] The methods detecting cancer can comprise the detection of one or more other cancer-associated polynucleotide or polypeptides sequences. Accordingly, detection of methylation of any one or more of the diagnostic biomarkers of the invention can be used either alone, or in combination with other biomarkers, for the diagnosis or prognosis of cancer.

[0132] The methods of the present invention can be used to determine the optimal course of treatment in a mammal with cancer. For example, the presence of methylated DNA within any of the diagnostic biomarkers of the invention or an increased quantity of methylation within any of the diagnostic biomarkers of the invention can indicate a reduced survival expectancy of a mammal with cancer, thereby indicating a more aggressive treatment for the mammal. In addition, a correlation can be readily established between the presence, absence or quantity of methylation at a diagnostic biomarker, as described herein, and the relative efficacy of one or another anti-cancer agent. Such analyses can be performed, e.g., retrospectively, i.e., by detecting methylation in one or more of the diagnostic genes in samples taken previously from mammals that have subsequently undergone one or more types of anti-cancer therapy, and correlating the known efficacy of the treatment with the presence, absence or levels of methylation of one or more of the diagnostic biomarkers.

[0133] In making a diagnosis, prognosis, risk assessment, classification, detection of recurrence or selection of therapy based on the presence or absence of methylation in at least one of the diagnostic biomarkers, the quantity of methylation may be compared to a threshold value that distinguishes between one diagnosis, prognosis, risk assessment, classification, etc., and another. For example, a threshold value can represent the degree of methylation found at a particular DNA region that adequately distinguishes between cancer samples and normal samples with a desired level of sensitivity and specificity. It is understood that a threshold value will likely vary depending on the assays used to measure methylation, but it is also understood that it is a relatively simple matter to determine a threshold value or range by measuring methylation of a DNA sequence in cancer samples and normal samples using the particular desired assay and then determining a value that distinguishes at least a majority of the cancer samples from a majority of non-cancer samples. If methylation of two or more DNA regions is detected, two or more different threshold values (one for each DNA region) will often, but not always, be used. Comparisons between a quantity of methylation of a sequence in a sample and a threshold value can be performed in any way known in the art. For example, a manual comparison can be made or a computer can compare and analyze the values to detect disease, assess the risk of contracting disease, determining a predisposition to disease, stage disease, diagnose disease, monitor, or aid in the selection of treatment for a person with disease.

[0134] In some embodiments, threshold values provide at least a specified sensitivity and specificity for detection of a particular cancer type. In some embodiments, the threshold value allows for at least a 50%, 60%, 70%, or 80% sensitivity and specificity for detection of a specific cancer, e.g., breast, lung, renal, liver, ovarian, head and neck, thyroid, bladder, cervical, colon, endometrial, esophageal, prostate cancer or melanoma.

[0135] In embodiments involving prognosis of cancer (including, for example, the prediction of progression of non-malignant lesions to invasive carcinoma, prediction of metastasis, prediction of disease recurrence or prediction of a response to a particular treatment), in some embodiments, the threshold value is set such that there is at least 10, 20, 30, 40, 50, 60, 70, 80% or more sensitivity and at least 70% specificity with regard to detecting cancer.

[0136] In some embodiments, the methods comprise recording a diagnosis, prognosis, risk assessment or classification, based on the methylation status determined from an individual. Any type of recordation is contemplated, including electronic recordation, e.g., by a computer.

### V. Kits

[0137] This invention also provides kits for the detection and/or quantification of the diagnostic biomarkers of the invention, or expression or methylation thereof using the methods described herein.

[0138] For kits that detect methylation, the kits of the invention can comprise at least one polynucleotide that hybridizes to at least one of the diagnostic biomarker sequences of the invention and at least one reagent for detection of gene methylation. Reagents for detection of methylation include, e.g., sodium bisulfite, polynucleotides designed to hybridize to sequence that is the product of a biomarker sequence of the invention if the biomarker sequence is not methylated (e.g., containing at least one C→U conversion), and/or a methylation-sensitive or methylation-dependent restriction enzyme. The kits can provide solid supports in the form of an assay apparatus that is adapted to use in the assay. The kits may further comprise detectable labels, optionally linked to a polynucleotide, e.g., a probe, in the kit. Other materials useful in the performance of the assays can also be included in the kits, including test tubes, transfer pipettes, and the like. The kits can also include written instructions for the use of one or more of these reagents in any of the assays described herein.

[0139] In some embodiments, the kits of the invention comprise one or more (e.g., 1, 2, 3, 4, or more) different polynucleotides (e.g., primers and/or probes) capable of specifically amplifying at least a portion of a DNA region where the DNA region is a sequence selected from the group consisting of SEQ ID NOS:385, 386, 387, 388, 389, 390, 391, 392, 393, 394, 395, 396, 397, 398, 399, 400, 401, 402, 403, 404, 405, 406, 407, 408, 409, 410, 411, 412, 413, 414, 415, 416, 417, 418, 419, 420, 421, 422, 423, 424, 425, 426, 427, 428, 429, 430, 431, 432, 433, 434, 435, 436, 437, 438, 439, 440, 441, 442, 443, 444, 445, 446, 447, 448, 449, 450, 451, 452, 453, 454, 455, 456, 457, 458, 459, 460, 461, 462, 463, 464, 465, 466, 467, 468, 469, 470, 471, 472, 473, 474, 475, 476, 477, 478, 479 and 480. Optionally, one or more detectably-labeled polypeptides capable of hybridizing to the amplified portion can also be included in the kit. In some embodiments, the kits comprise sufficient primers to amplify 2, 3, 4, 5, 6, 7, 8, 9, 10, or more different DNA regions or portions thereof, and optionally include detectably-labeled polynucleotides capable of hybridizing to each amplified DNA region or portion thereof. The kits further can comprise a methylation-dependent or methylation sensitive restriction enzyme and/or sodium bisulfite.

[0140] In some embodiments, the kits comprise sodium bisulfite, primers and adapters (e.g., oligonucleotides that can be ligated or otherwise linked to genomic fragments) for whole genome amplification, and polynucleotides (e.g., detectably-labeled polynucleotides) to quantify the presence of the converted methylated and/or the converted unmethylated sequence of at least one cytosine from a DNA region that is selected from the group consisting of SEQ ID NOS:385, 386, 387, 388, 389, 390, 391, 392, 393, 394, 395, 396, 397, 398, 399, 400, 401, 402, 403, 404, 405, 406, 407, 408, 409, 410, 411, 412, 413, 414, 415, 416, 417, 418, 419, 420, 421, 422, 423, 424, 425, 426, 427, 428, 429, 430, 431, 432, 433, 434, 435, 436, 437, 438, 439, 440, 441, 442, 443, 444, 445, 446, 447, 448, 449, 450, 451, 452, 453, 454, 455, 456, 457, 458, 459, 460, 461, 462, 463, 464, 465, 466, 467, 468, 469, 470, 471, 472, 473, 474, 475, 476, 477, 478, 479 and 480.

[0141] In some embodiments, the kits comprise a methylation sensing restriction enzymes (e.g., a methylation-dependent restriction enzyme and/or a methylation-sensitive restriction enzyme), primers and adapters for whole genome amplification, and polynucleotides to quantify the number of copies of at least a portion of a DNA region where the DNA region is selected from the group consisting of SEQ ID NOS:385, 386, 387, 388, 389, 390, 391, 392, 393, 394, 395, 396, 397, 398, 399, 400, 401, 402, 403, 404, 405, 406, 407, 408, 409, 410, 411, 412, 413, 414, 415, 416, 417, 418, 419, 420, 421, 422, 423, 424, 425, 426, 427, 428, 429, 430, 431, 432, 433, 434, 435, 436, 437, 438, 439, 440, 441, 442, 443, 444, 445, 446, 447, 448, 449, 450, 451, 452, 453, 454, 455, 456, 457, 458, 459, 460, 461, 462, 463, 464, 465, 466, 467, 468, 469, 470, 471, 472, 473, 474, 475, 476, 477, 478, 479 and 480.

[0142] In some embodiments, the kits comprise a methylation binding moiety and one or more polynucleotides to quantify the number of copies of at least a portion of a DNA region where the DNA region is selected from the group consisting of SEQ ID NOS:385, 386, 387, 388, 389, 390, 391, 392, 393, 394, 395, 396, 397, 398, 399, 400, 401, 402, 403, 404, 405, 406, 407, 408, 409, 410, 411, 412, 413, 414, 415, 416, 417, 418, 419, 420, 421, 422, 423, 424, 425, 426, 427, 428, 429, 430, 431, 432, 433, 434, 435, 436, 437, 438, 439, 440, 441, 442, 443, 444, 445, 446, 447, 448, 449, 450, 451, 452, 453, 454, 455, 456, 457, 458, 459, 460, 461, 462, 463, 464, 465, 466, 467, 468, 469, 470, 471, 472, 473, 474, 475, 476, 477, 478, 479 and 480. A methylation binding moiety refers to a molecule (e.g., a polypeptide) that specifically binds to methyl-cytosine. Examples include restriction enzymes or fragments thereof that lack DNA cutting activity but retain the ability to bind methylated DNA, antibodies that specifically bind to methylated DNA, etc.).

### VI. Computer-Based Methods

[0143] The calculations for the methods described herein can involve computer-based calculations and tools. For example, a methylation value for a DNA region or portion thereof can be compared by a computer to a threshold value, as described herein. The tools are advantageously provided in the form of computer programs that are executable by a general purpose computer system (referred to herein as a “host computer”) of conventional design. The host computer may be configured with many different hardware components and can be made in many dimensions and styles (e.g., desktop PC, laptop, tablet PC, handheld computer, server, workstation, mainframe). Standard components, such as monitors, keyboards, disk drives, CD and/or DVD drives, and the like, may be included. Where the host computer is attached to a network, the connections may be provided via any suitable transport media (e.g., wired, optical, and/or wireless media) and any suitable communication protocol (e.g., TCP/IP); the host computer may include suitable networking hardware (e.g., modem, Ethernet card, WiFi card). The host computer may implement any of a variety of operating systems, including UNIX, Linux, Microsoft Windows, MacOS, or any other operating system.

[0144] Computer code for implementing aspects of the present invention may be written in a variety of languages, including PERL, C, C++, Java, JavaScript, VBScript, AWK, or any other scripting or programming language that can be executed on the host computer or that can be compiled to execute on the host computer. Code may also be written or distributed in low level languages such as assembler languages or machine languages.

[0145] The host computer system advantageously provides an interface via which the user controls operation of the tools. In the examples described herein, software tools are implemented as scripts (e.g., using PERL), execution of which can be initiated by a user from a standard command line interface of an operating system such as Linux or UNIX. Those skilled in the art will appreciate that commands can be adapted to the operating system as appropriate. In other embodiments, a graphical user interface may be provided, allowing the user to control operations using a pointing device. Thus, the present invention is not limited to any particular user interface.

[0146] Scripts or programs incorporating various features of the present invention may be encoded on various computer readable media for storage and/or transmission. Examples of suitable media include magnetic disk or tape, optical storage media such as compact disk (CD) or DVD (digital versatile disk), flash memory, and carrier signals adapted for transmission via wired, optical, and/or wireless networks conforming to a variety of protocols, including the Internet.

### EXAMPLES

### Example 1

### Identification of Cancer DNA Methylation Biomarkers and Design of Independent DNA Methylation Validation Assays

[0147] Loci that are differentially methylated in tumors relative to matched adjacent histologically normal tissue were identified using a DNA microarray-based technology platform that utilizes the methylation-dependent restriction enzyme McrBC. See, e.g., U.S. Pat. No. 7,186,512. The genomic region in which a given microarray feature can report DNA methylation status is dependent upon the molecular size of the DNA fragments that are labeled for the microarray hybridizations. In the microarray experiments, DNA in the size range of 1 to 4 kb was purified by agarose gel extraction and used as template for cyanogen dye labeling. Therefore, the genomic region interrogated by each microarray feature is 8 kb (i.e., 4 kb upstream and 4 bp downstream of the sequence represented by the microarray feature). Note that some features represent loci in which there is no Ensembl gene ID and no annotated transcribed gene within 1 kb of the microarray feature (e.g., Locus No.: 6, 22, 29, 31, 37, 46, 65, 71, and 96), and some features have Ensembl gene IDs but no gene description (e.g., Locus No.: 3, 11, 12, 18, 28, 36, 40, 41, 53, 56, 61, 67, 70, 76, 79, 84 and 88). Also note that some features represent loci in which more than one Ensembl annotated gene is within 1 kb of the microarray feature (e.g., Locus No.: 5, 23, 24, 36, 42, 49, 60, 62, 73, 75, 83, 88, 90, 92 and 94). DNA methylation at these loci may potentially affect the regulation of any of these neighboring genes. Detailed information about the selected loci can be found in Tables 1-4 and the section “INFORMAL SEQUENCE LISTING.”

[0148] PCR primers were designed that interrogated 96 total loci as follows: 36 loci which were predicted to be differentially methylated between breast tumor and histologically normal breast tissue, 36 loci which were predicted to be differentially methylated between lung tumor and histologically normal lung tissue, and 24 loci which were predicted to be differentially methylated between ovarian tumor and histologically normal ovarian tissue. Due to the functional properties of the enzyme, DNA methylation-dependent depletion of DNA fragments by McrBC is capable of monitoring the DNA methylation status of sequences neighboring the genomic sequences represented by the features on the microarray described above (wingspan). Since the size of DNA fragments analyzed as described in Example 1 was approximately 1-4 kb, an 8 kb region spanning the sequence represented by the microarray feature was selected as an estimate of the predicted region of differential methylation. For each locus, PCR primers were selected within an approximately 1 kb region flanking the genomic sequence represented on the DNA microarray (approximately 500 bp upstream and 500 bp downstream). Selection of primer sequences was guided by uniqueness of the primer sequence across the genome, as well as the distribution of purine-CG sequences within the 1 kb region. PCR primer pairs were selected to amplify an approximately 400-600 bp sequence within each 1 kb region. Optimal PCR cycling conditions for the primer pairs were empirically determined, and amplification of a specific PCR amplicon of the correct size was verified. The sequences of the microarray features, primer pairs and amplicons are indicated in Table 4, and in the “INFORMAL SEQUENCE LISTING” section.

TABLE 1
Features reporting differential DNA methylation between breast tumor and histologically
normal breast tissue and identity of annotated genes within 1 kb of each feature.

| Locus | | | |
|---|---|---|---|
| Number | Feature Name | Ensembl Gene ID | Annotation |
| 1 | ha1c_00037 | ENSG00000141646 | Mothers against decapentaplegic homolog 4 (SMAD 4) (Mothers |
| | | | against DPP homolog 4) (Deletion target in pancreatic carcinoma 4) |
| | | | (hSMAD4). [Source: Uniprot/SWISSPROT; Acc: Q13485] |
| 2 | ha1g_01283 | ENSG00000138650 | Protocadherin 10 precursor. |
| | | | [Source: Uniprot/SWISSPROT; Acc: Q9P2E7] |
| 3 | ha1g_01465 | ENSG00000184653 | no desc |
| 4 | ha1g_02335 | ENSG00000106006 | Homeobox protein Hox-A6 (Hox-1B). |
| | | | [Source: Uniprot/SWISSPROT; Acc: P31267] |
| 5 | ha1g_04114 | ENSG00000105808 | Ras GTPase-activating protein 4 (RasGAP-activating-like protein 2) |
| | | | (Calcium-promoted Ras inactivator). |
| | | | [Source: Uniprot/SWISSPROT; Acc: O43374] |
| | | ENSG00000170667 | Ras GTPase-activating protein 4 (RasGAP-activating-like protein 2) |
| | | | (Calcium-promoted Ras inactivator). |
| | | | [Source: Uniprot/SWISSPROT; Acc: O43374] |
| 6 | ha1g_04194 | N/A | N/A |
| 7 | ha1p_05922 | ENSG00000099256 | phosphoribosyl transferase domain containing 1 |
| | | | [Source: RefSeq_peptide; Acc: NP_064585] |
| 8 | ha1p_09663 | ENSG00000106511 | Homeobox protein MOX-2 (Mesenchyme homeobox 2) (Growth |
| | | | arrest-specific homeobox). |
| | | | [Source: Uniprot/SWISSPROT; Acc: P50222] |
| 9 | ha1p_100558 | ENSG00000174576 | HLH-PAS transcription factor NXF |
| | | | [Source: RefSeq_peptide; Acc: NP_849195] |
| 10 | ha1p_10286 | ENSG00000122691 | Twist-related protein 1 (H-twist). |
| | | | [Source: Uniprot/SWISSPROT; Acc: Q15672] |
| 11 | ha1p_108198 | ENSG00000179859 | no desc |
| 12 | ha1p_16916 | ENSG00000198317 | no desc |
| 13 | ha1p_18823 | ENSG00000112333 | Orphan nuclear receptor NR2E1 (Nuclear receptor TLX) (Tailless |
| | | | homolog) (Tll) (hTll). [Source: Uniprot/SWISSPROT; Acc: Q9Y466] |
| 14 | ha1p_22139 | ENSG00000118564 | F-box/LRR-repeat protein 5 (F-box and leucine-rich repeat protein |
| | | | 5) (F-box protein FBL4/FBL5) (p45SKP2-like protein). |
| | | | [Source: Uniprot/SWISSPROT; Acc: Q9UKA1] |
| 15 | ha1p_26420 | ENSG00000134371 | parafibromin [Source: RefSeq_peptide; Acc: NP_078805] |
| 16 | ha1p_38800 | ENSG00000130340 | Sorting nexin-9 (SH3 and PX domain-containing protein 1) (SDP1 |
| | | | protein). [Source: Uniprot/SWISSPROT; Acc: Q9Y5X1] |
| 17 | ha1p_41780 | ENSG00000163430 | Follistatin-related protein 1 precursor (Follistatin-like 1). |
| | | | [Source: Uniprot/SWISSPROT; Acc: Q12841] |
| 18 | ha1p_42103 | ENSG00000036054 | no desc |
| 19 | ha1p_47490 | ENSG00000179950 | fuse-binding protein-interacting represser isoform b |
| | | | [Source: RefSeq_peptide; Acc: NP_055096] |
| 20 | ha1p_47995 | ENSG00000179110 | Olfactory receptor 13C3. |
| | | | [Source: Uniprot/SWISSPROT; Acc: Q8NGS6] |
| 21 | ha1p_54181 | ENSG00000128602 | Smoothened homolog precursor (SMO) (Gx protein). |
| | | | [Source: Uniprot/SWISSPROT; Acc: Q99835] |
| 22 | ha1p_57326 | N/A | N/A |
| 23 | ha1p_60271 | ENSG00000163155 | LysM, putative peptidoglycan-binding, domain containing 1 |
| | | | [Source: RefSeq_peptide; Acc: NP_997716] |
| | | ENSG00000163156 | sodium channel modifier 1 isoform 1 |
| | | | [Source: RefSeq_peptide; Acc: NP_076946] |
| 24 | ha1p_62820 | ENSG00000174227 | GPI7 protein [Source: RefSeq_peptide; Acc: NP_060203] |
| | | ENSG00000186777 | no desc |
| 25 | ha1p_64271 | ENSG00000181449 | Transcription factor SOX-2. |
| | | | [Source: Uniprot/SWISSPROT; Acc: P48431] |
| 26 | ha1p_69412 | ENSG00000188015 | S100 calcium-binding protein A3 (S-100E protein). |
| | | | [Source: Uniprot/SWISSPROT; Acc: P33764] |
| 27 | ha1p_70432 | ENSG00000134020 | PEBP family protein precursor. |
| | | | [Source: Uniprot/SWISSPROT; Acc: Q96S96] |
| 28 | ha1p_71854 | ENSG00000160544 | no desc |
| 29 | ha1p_81638 | N/A | N/A |
| 30 | ha1p_86556 | ENSG00000165795 | NDRG2 protein (Syld709613 protein). |
| | | | [Source: Uniprot/SWISSPROT; Acc: Q9UN36] |
| 31 | ha1p_91110 | N/A | N/A |
| 32 | ha1p_94558 | ENSG00000128564 | Neurosecretory protein VGF precursor. |
| | | | [Source: Uniprot/SWISSPROT; Acc: O15240] |
| 33 | ha1p_96544 | ENSG00000187570 | Melanoma derived growth regulatory protein precursor (Melanoma |
| | | | inhibitory activity). [Source: Uniprot/SWISSPROT; Acc: Q16674] |
| 34 | ha1p_97458 | ENSG00000187800 | Novel protein similar to mouse Jedi soluble isoform 736 protein. |
| | | | [Source: Uniprot/SPTREMBL; Acc: Q5VY43] |
| 35 | ha1p_97786 | ENSG00000141750 | SH3 and cysteine rich domain 2 |
| | | | [Source: RefSeq_peptide; Acc: NP_945344] |
| 36 | ha1p_98401 | ENSG00000172803 | no desc |
| | | ENSG00000197847 | no desc |

TABLE 2
Features reporting differential DNA methylation between lung tumor and histologically
normal lung tissue and identity of annotated genes within 1 kb of each feature.

| Locus | | | |
|---|---|---|---|
| Number | Feature Name | Ensembl Gene ID | Annotation |
| 37 | ha1g_00353 | N/A | N/A |
| 38 | ha1p_00553 | ENSG00000088726 | transmembrane protein 40 |
| | | | [Source: RefSeq_peptide; Acc: NP_060776] |
| 39 | ha1p_04444 | ENSG00000151474 | FERM domain containing protein 4A. |
| | | | [Source: Uniprot/SWISSPROT; Acc: Q9P2Q2] |
| 40 | ha1p_07264 | ENSG00000109851 | no desc |
| 41 | ha1p_08159 | ENSG00000188590 | no desc |
| 42 | ha1p_103437 | ENSG00000161680 | no desc |
| | | ENSG00000161681 | Synaptotagmin-3 (Synaptotagmin III) (SytIII). |
| | | | [Source: Uniprot/SWISSPROT; Acc: Q9BQG1] |
| 43 | ha1p_105187 | ENSG00000108774 | Ras-related protein Rab-5C (RAB5L) (L1880). |
| | | | [Source: Uniprot/SWISSPROT; Acc: P51148] |
| 44 | ha1p_105778 | ENSG00000144218 | AF4/FMR2 family member 3 (LAF-4 protein) (Lymphoid nuclear |
| | | | protein related to AF4). |
| | | | [Source: Uniprot/SWISSPROT; Acc: P51826] |
| 45 | ha1p_10757 | ENSG00000197576 | Homeobox protein Hox-A4 (Hox-1D) (Hox-1.4). |
| | | | [Source: Uniprot/SWISSPROT; Acc: Q00056] |
| 46 | ha1p_108911 | N/A | N/A |
| 47 | ha1p_111312 | ENSG00000176130 | P2Y purinoceptor 11 (P2Y11). |
| | | | [Source: Uniprot/SWISSPROT; Acc: Q96G91] |
| 48 | ha1p_12483 | ENSG00000106554 | Coiled-coil-helix-coiled-coil-helix domain containing protein 3. |
| | | | [Source: Uniprot/SWISSPROT; Acc: Q9NX63] |
| 49 | ha1p_16097 | ENSG00000175879 | Homeobox protein Hox-D8 (Hox-4E) (Hox-5.4). |
| | | | [Source: Uniprot/SWISSPROT; Acc: P13378] |
| | | ENSG00000175892 | no desc |
| 50 | ha1p_27029 | ENSG00000162624 | LIM homeobox 8 [Source: RefSeq_peptide; Acc: NP_001001933] |
| 51 | ha1p_29823 | ENSG00000008197 | transcription factor AP-2 beta-like 1 |
| | | | [Source: RefSeq_peptide; Acc: NP_758438] |
| 52 | ha1p_40588 | ENSG00000135116 | Activator of apoptosis harakiri (Neuronal death protein DP5) |
| | | | (BH3 interacting domain protein 3). |
| | | | [Source: Uniprot/SWISSPROT; Acc: O00198] |
| 53 | ha1p_45692 | ENSG00000176147 | no desc |
| 54 | ha1p_47429 | ENSG00000054803 | Cerebellin 4 precursor (Cerebellin-like glycoprotein 1). |
| | | | [Source: Uniprot/SWISSPROT; Acc: Q9NTU7] |
| 55 | ha1p_49581 | ENSG00000099954 | Cat eye syndrome critical region protein 2. |
| | | | [Source: Uniprot/SWISSPROT; Acc: Q9BXF3] |
| 56 | ha1p_55371 | ENSG00000181384 | no desc |
| 57 | ha1p_58788 | ENSG00000108924 | Hepatic leukemia factor. |
| | | | [Source: Uniprot/SWISSPROT; Acc: Q16534] |
| 58 | ha1p_59216 | ENSG00000123576 | Extraembryonic, spermatogenesis, homeobox 1-like protein. |
| | | | [Source: Uniprot/SWISSPROT; Acc: Q8N693] |
| 59 | ha1p_61568 | ENSG00000196966 | Histone H3.1 (H3/a) (H3/c) (H3/d) (H3/f) (H3/h) (H3/i) (H3/j) |
| | | | (H3/k) (H3/l). [Source: Uniprot/SWISSPROT; Acc: P68431] |
| 60 | ha1p_61745 | ENSG00000115425 | Peroxisomal trans-2-enoyl-CoA reductase (EC 1.3.1.38) (TERP) |
| | | | (HPDHase) (pVI-ARL) (2,4-dienoyl-CoA reductase-related |
| | | | protein) (DCR-RP). [Source: Uniprot/SWISSPROT; Acc: Q9BY49] |
| | | ENSG00000163449 | no desc |
| 61 | ha1p_62060 | ENSG00000162877 | no desc |
| 62 | ha1p_62154 | ENSG00000158403 | None. [Source: Uniprot/SPTREMBL; Acc: Q92646] |
| | | ENSG00000178458 | Histone H3.1 (H3/a) (H3/c) (H3/d) (H3/f) (H3/h) (H3/i) (H3/j) |
| | | | (H3/k) (H3/l). [Source: Uniprot/SWISSPROT; Acc: P68431] |
| 63 | ha1p_62869 | ENSG00000100626 | Putative polypeptide N-acetylgalactosaminyltransferase-like protein |
| | | | 1 (EC 2.4.1.41) (Protein-UDP acetylgalactosaminyltransferase-like |
| | | | protein 1) (UDP-GalNAc:polypeptide N- |
| | | | acetylgalactosaminyltransferase- like protein 1) (Polypeptide |
| | | | GalNAc transferase-like |
| | | | [Source: Uniprot/SWISSPROT; Acc: Q8N428] |
| 64 | ha1p_64529 | ENSG00000157566 | Plasma glutathione peroxidase precursor (EC 1.11.1.9) (GSHPx-P) |
| | | | (Extracellular glutathione peroxidase) (GPx-P). |
| | | | [Source: Uniprot/SWISSPROT; Acc: P22352] |
| 65 | ha1p_77581 | N/A | N/A |
| 66 | ha1p_78965 | ENSG00000142700 | Doublesex-mab-3 (DM) domain (Fragment). |
| | | | [Source: Uniprot/SPTREMBL; Acc: Q96SC8] |
| 67 | ha1p_80400 | ENSG00000177107 | no desc |
| 68 | ha1p_81949 | ENSG00000135447 | Protein phosphatase inhibitor 1 (IPP-1) (1-1). |
| | | | [Source: Uniprot/SWISSPROT; Acc: Q13522] |
| 69 | ha1p_82549 | ENSG00000174059 | Hematopoietic progenitor cell antigen CD34 precursor. |
| | | | [Source: Uniprot/SWISSPROT; Acc: P28906] |
| 70 | ha1p_84580 | ENSG00000176938 | no desc |
| 71 | ha1p_86042 | N/A | N/A |
| 72 | ha1p_95305 | ENSG00000167889 | beta(1,6)-N-acetylglucosaminyltransferase V isoform 1 |
| | | | [Source: RefSeq_peptide; Acc: NP_653278] |

TABLE 3
Features reporting differential methylation between ovarian tumor and histologically
normal ovarian tissue and identity of annotated genes within 1 kb of each feature.

| Locus | | | |
|---|---|---|---|
| Number | Feature Name | Ensembl Gene ID | Annotation |
| 73 | CHR01P152508183 | ENSG00000160752 | Farnesyl pyrophosphate synthetase (FPP synthetase) (FPS) |
| | | | (Farnesyl diphosphate synthetase) [Includes: |
| | | | Dimethylallyltranstransferase (EC 2.5.1.1); Geranyltranstransferase |
| | | | (EC 2.5.1.10)]. [Source: Uniprot/SWISSPROT; Acc: P14324] |
| | | ENSG00000160753 | RUN and SH3 domain containing protein 1 (New molecule |
| | | | containing SH3 at the carboxy-terminus) (Nesca). |
| | | | [Source: Uniprot/SWISSPROT; Acc: Q9BVN2] |
| | | ENSG00000181363 | no desc |
| 74 | CHR02P046721735 | ENSG00000171142 | ATPase, H+ transporting, lysosomal 31 kDa, V1 subunit E isoform |
| | | | 2 [Source: RefSeq_peptide; Acc: NP_542384] |
| 75 | CHR04P001292657 | ENSG00000090316 | macrophage erythroblast attacher isoform 2 |
| | | | [Source: RefSeq_peptide; Acc: NP_005873] |
| | | ENSG00000188538 | no desc |
| 76 | CHR05P043085585 | ENSG00000177721 | no desc |
| 77 | CHR08P097127672 | ENSG00000156466 | growth differentiation factor 6 |
| | | | [Source: RefSeq_peptide; Acc: NP_001001557] |
| 78 | CHR08P102461728 | ENSG00000083307 | transcription factor CP2-like 3 |
| | | | [Source: RefSeq_peptide; Acc: NP_079191] |
| 79 | CHR08P143804195 | ENSG00000184865 | no desc |
| 80 | CHR09P021979668 | ENSG00000147889 | Cyclin-dependent kinase 4 inhibitor A (CDK4I) (p16-INK4) (p16- |
| | | | INK4a) (Multiple tumor suppressor 1) (MTS1). |
| | | | [Source: Uniprot/SWISSPROT; Acc: P42771] |
| 81 | CHR09P067743642 | ENSG00000107282 | Amyloid beta A4 precursor protein-binding family A member 1 |
| | | | (Neuron- specific X11 protein) (Neuronal Munc 18-1-interacting |
| | | | protein 1) (Mint- 1) (Adapter protein X11alpha). |
| | | | [Source: Uniprot/SWISSPROT; Acc: Q02410] |
| 82 | CHR11P010436241 | ENSG00000133805 | AMP deaminase 3 (EC 3.5.4.6) (AMP deaminase isoform E) |
| | | | (Erythrocyte AMP deaminase). |
| | | | [Source: Uniprot/SWISSPROT; Acc: Q01432] |
| 83 | CHR11P117233022 | ENSG00000137731 | Sodium/potassium-transporting ATPase gamma chain (Sodium |
| | | | pump gamma chain) (Na+/K+ ATPase gamma subunit) (FXYD |
| | | | domain-containing ion transport regulator 2). |
| | | | [Source: Uniprot/SWISSPROT; Acc: P54710] |
| | | ENSG00000137746 | no desc |
| 84 | CHR12P044081945 | ENSG00000177119 | no desc |
| 85 | CHR13P042532794 | ENSG00000139656 | MGC5590 protein. [Source: Uniprot/SPTREMBL; Acc: Q9BVW6] |
| 86 | CHR14P049549993 | ENSG00000100505 | Tripartite motif protein 9 (RING finger protein 91). |
| | | | [Source: Uniprot/SWISSPROT; Acc: Q9C026] |
| 87 | CHR15P062682028 | ENSG00000180357 | zinc finger protein 609 [Source: RefSeq_peptide; Acc: NP_055857] |
| 88 | CHR16P070471895 | ENSG00000132613 | no desc |
| | | ENSG00000183452 | no desc |
| 89 | CHR17P007309455 | ENSG00000132535 | Postsynaptic density protein 95 (PSD-95) (Synapse-associated |
| | | | protein 90) (SAP90) (Discs large homolog 4). |
| | | | [Source: Uniprot/SWISSPROT; Acc: P78352] |
| 90 | CHR19P047620296 | ENSG00000079435 | Hormone-sensitive lipase (EC 3.1.1.79) (HSL). |
| | | | [Source: Uniprot/SWISSPROT; Acc: Q05469] |
| | | ENSG00000182797 | no desc |
| 91 | CHR19P054350430 | ENSG00000130528 | Sarcoplasmic reticulum histidine-rich calcium-binding protein |
| | | | precursor. [Source: Uniprot/SWISSPROT; Acc: P23327] |
| 92 | CHR19P059796623 | ENSG00000104974 | Leukocyte immunoglobulin-like receptor subfamily A member 1 |
| | | | precursor (Leucocyte immunoglobulin-like receptor 6) (LIR-6) |
| | | | (CD85i antigen). [Source: Uniprot/SWISSPROT; Acc: O75019] |
| | | ENSG00000131042 | Leukocyte immunoglobulin-like receptor subfamily B member 2 |
| | | | precursor (Leukocyte immunoglobulin-like receptor 2) (LIR-2) |
| | | | (Immunoglobulin- like transcript 4) (ILT-4) |
| | | | (Monocyte/macrophage immunoglobulin-like receptor 10) (MIR- |
| | | | 10) (CD85d antigen).[Source: Uniprot/SWISSPROT; Acc: O75019] |
| 93 | CHR20P038041321 | ENSG00000101438 | Vesicular inhibitory amino acid transporter (GABA and glycine |
| | | | transporter) (Vesicular GABA transporter) (hVIAAT) (Solute |
| | | | carrier family 32 member 1). |
| | | | [Source: Uniprot/SWISSPROT; Acc: Q9H598] |
| 94 | ha1p_108204_150 | ENSG00000170043 | Trafficking protein particle complex subunit 1 (BET5 homolog) |
| | | | (Multiple myeloma protein 2) (MUM-2). |
| | | | [Source: Uniprot/SWISSPROT; Acc: Q9Y5R8] |
| | | ENSG00000170049 | Voltage-gated potassium channel beta-3 subunit (K(+) channel |
| | | | beta-3 subunit) (Kv-beta-3). |
| | | | [Source: Uniprot/SWISSPROT; Acc: O43448] |
| 95 | ha1p_48631_150 | ENSG00000124839 | Ras-related protein Rab-17. |
| | | | [Source: Uniprot/SWISSPROT; Acc: Q9H0T7] |
| 96 | ha1p_94692_150 | N/A | N/A |

TABLE 4
Sequence identifier numbers (SEQ ID NOS:) for all sequences described
in the application. See section “INFORMAL SEQUENCE LISTING”
for actual sequences as listed by number in the table.

| | | | | | DNA |
|---|---|---|---|---|---|
| | Locus | Left | Right | Amplicon | Region |
| Feature Name | Number | primer | primer | Sequence | Sequence |
| ha1c_00037 | 1 | 97 | 98 | 289 | 385 |
| ha1g_01283 | 2 | 99 | 100 | 290 | 386 |
| ha1g_01465 | 3 | 101 | 102 | 291 | 387 |
| ha1g_02335 | 4 | 103 | 104 | 292 | 388 |
| ha1g_04114 | 5 | 105 | 106 | 293 | 389 |
| ha1g_04194 | 6 | 107 | 108 | 294 | 390 |
| ha1p_05922 | 7 | 109 | 110 | 295 | 391 |
| ha1p_09663 | 8 | 111 | 112 | 296 | 392 |
| ha1p_100558 | 9 | 113 | 114 | 297 | 393 |
| ha1p_10286 | 10 | 115 | 116 | 298 | 394 |
| ha1p_108198 | 11 | 117 | 118 | 299 | 395 |
| ha1p_16916 | 12 | 119 | 120 | 300 | 396 |
| ha1p_18823 | 13 | 121 | 122 | 301 | 397 |
| ha1p_22139 | 14 | 123 | 124 | 302 | 398 |
| ha1p_26420 | 15 | 125 | 126 | 303 | 399 |
| ha1p_38800 | 16 | 127 | 128 | 304 | 400 |
| ha1p_41780 | 17 | 129 | 130 | 305 | 401 |
| ha1p_42103 | 18 | 131 | 132 | 306 | 402 |
| ha1p_47490 | 19 | 133 | 134 | 307 | 403 |
| ha1p_47995 | 20 | 135 | 136 | 308 | 404 |
| ha1p_54181 | 21 | 137 | 138 | 309 | 405 |
| ha1p_57326 | 22 | 139 | 140 | 310 | 406 |
| ha1p_60271 | 23 | 141 | 142 | 311 | 407 |
| ha1p_62820 | 24 | 143 | 144 | 312 | 408 |
| ha1p_64271 | 25 | 145 | 146 | 313 | 409 |
| ha1p_69412 | 26 | 147 | 148 | 314 | 410 |
| ha1p_70432 | 27 | 149 | 150 | 315 | 411 |
| ha1p_71854 | 28 | 151 | 152 | 316 | 412 |
| ha1p_81638 | 29 | 153 | 154 | 317 | 413 |
| ha1p_86556 | 30 | 155 | 156 | 318 | 414 |
| ha1p_91110 | 31 | 157 | 158 | 319 | 415 |
| ha1p_94558 | 32 | 159 | 160 | 320 | 416 |
| ha1p_96544 | 33 | 161 | 162 | 321 | 417 |
| ha1p_97458 | 34 | 163 | 164 | 322 | 418 |
| ha1p_97786 | 35 | 165 | 166 | 323 | 419 |
| ha1p_98401 | 36 | 167 | 168 | 324 | 420 |
| ha1g_00353 | 37 | 169 | 170 | 325 | 421 |
| ha1p_00553 | 38 | 171 | 172 | 326 | 422 |
| ha1p_04444 | 39 | 173 | 174 | 327 | 423 |
| ha1p_07264 | 40 | 175 | 176 | 328 | 424 |
| ha1p_08159 | 41 | 177 | 178 | 329 | 425 |
| ha1p_103437 | 42 | 179 | 180 | 330 | 426 |
| ha1p_105187 | 43 | 181 | 182 | 331 | 427 |
| ha1p_105778 | 44 | 183 | 184 | 332 | 428 |
| ha1p_10757 | 45 | 185 | 186 | 333 | 429 |
| ha1p_108911 | 46 | 187 | 188 | 334 | 430 |
| ha1p_111312 | 47 | 189 | 190 | 335 | 431 |
| ha1p_12483 | 48 | 191 | 192 | 336 | 432 |
| ha1p_16097 | 49 | 193 | 194 | 337 | 433 |
| ha1p_27029 | 50 | 195 | 196 | 338 | 434 |
| ha1p_29823 | 51 | 197 | 198 | 339 | 435 |
| ha1p_40588 | 52 | 199 | 200 | 340 | 436 |
| ha1p_45692 | 53 | 201 | 202 | 341 | 437 |
| ha1p_47429 | 54 | 203 | 204 | 342 | 438 |
| ha1p_49581 | 55 | 205 | 206 | 343 | 439 |
| ha1p_55371 | 56 | 207 | 208 | 344 | 440 |
| ha1p_58788 | 57 | 209 | 210 | 345 | 441 |
| ha1p_59216 | 58 | 211 | 212 | 346 | 442 |
| ha1p_61568 | 59 | 213 | 214 | 347 | 443 |
| ha1p_61745 | 60 | 215 | 216 | 348 | 444 |
| ha1p_62060 | 61 | 217 | 218 | 349 | 445 |
| ha1p_62154 | 62 | 219 | 220 | 350 | 446 |
| ha1p_62869 | 63 | 221 | 222 | 351 | 447 |
| ha1p_64529 | 64 | 223 | 224 | 352 | 448 |
| ha1p_77581 | 65 | 225 | 226 | 353 | 449 |
| ha1p_78965 | 66 | 227 | 228 | 354 | 450 |
| ha1p_80400 | 67 | 229 | 230 | 355 | 451 |
| ha1p_81949 | 68 | 231 | 232 | 356 | 452 |
| ha1p_82549 | 69 | 233 | 234 | 357 | 453 |
| ha1p_84580 | 70 | 235 | 236 | 358 | 454 |
| ha1p_86042 | 71 | 237 | 238 | 359 | 455 |
| ha1p_95305 | 72 | 239 | 240 | 360 | 456 |
| CHR01P152508183 | 73 | 241 | 242 | 361 | 457 |
| CHR02P046721735 | 74 | 243 | 244 | 362 | 458 |
| CHR04P001292657 | 75 | 245 | 246 | 363 | 459 |
| CHR05P043085585 | 76 | 247 | 248 | 364 | 460 |
| CHR08P097127672 | 77 | 249 | 250 | 365 | 461 |
| CHR08P102461728 | 78 | 251 | 252 | 366 | 462 |
| CHR08P143804195 | 79 | 253 | 254 | 367 | 463 |
| CHR09P021979668 | 80 | 255 | 256 | 368 | 464 |
| CHR09P067743642 | 81 | 257 | 258 | 369 | 465 |
| CHR11P010436241 | 82 | 259 | 260 | 370 | 466 |
| CHR11P117233022 | 83 | 261 | 262 | 371 | 467 |
| CHR12P044081945 | 84 | 263 | 264 | 372 | 468 |
| CHR13P042532794 | 85 | 265 | 266 | 373 | 469 |
| CHR14P049549993 | 86 | 267 | 268 | 374 | 470 |
| CHR15P062682028 | 87 | 269 | 270 | 375 | 471 |
| CHR16P070471895 | 88 | 271 | 272 | 376 | 472 |
| CHR17P007309455 | 89 | 273 | 274 | 377 | 473 |
| CHR19P047620296 | 90 | 275 | 276 | 378 | 474 |
| CHR19P054350430 | 91 | 277 | 278 | 379 | 475 |
| CHR19P059796623 | 92 | 279 | 280 | 380 | 476 |
| CHR20P038041321 | 93 | 281 | 282 | 381 | 477 |
| ha1p_108204_150 | 94 | 283 | 284 | 382 | 478 |
| ha1p_48631_150 | 95 | 285 | 286 | 383 | 479 |
| ha1p_94692_150 | 96 | 287 | 288 | 384 | 480 |

### Example 2

### Validation of DNA Methylation Changes in a Large Number of Independent Breast Tumor and Histologically Normal Breast Samples

[0149] The differential DNA methylation status of 36 loci (Table 1) was further validated by analyzing an independent panel of 24 breast carcinoma samples and 25 histologically normal breast samples. Each sample was split into two equal portions of 4 μg. One portion was digested with McrBC (Treated Portion) in a total volume of 200 μL including 1×NEB2 buffer (New England Biolabs), 0.1 mg/mL bovine serum albumin (New England Biolabs), 2 mM GTP (Roche) and 32 units McrBC (New England Biolabs). The second portion was mock treated under identical conditions, except that 3.2 μL sterile 50% glycerol was added instead of McrBC enzyme (Untreated Portion). Samples were incubated at 37° C. for approximately 12 hours, followed by incubation at 60° C. to inactivate the McrBC enzyme.

[0150] The extent of McrBC cleavage at each locus was monitored by quantitative real-time PCR (qPCR). For each assayed locus, qPCR was performed using 20 ng of the Untreated Portion DNA as template and, separately, using 20 ng of the Treated Portion DNA as template. Each reaction was performed in 10 μL total volume including 1× LightCycler 480 SYBR Green I Master mix (Roche) and 625 nM of each primer. Reactions were run in a Roche LightCycler 480 instrument. Cycling conditions were: 95° C. for 5 min.; 45 cycles of 95° C. for 1 min., 66° C. for 30 sec., 72° C. for 1 min., 83° C. for 2 sec. followed by a plate read. Melting curves were calculated under the following conditions: 95° C. for 5 sec., 65° C. for 1 min., 65° C. to 95° C. at 2.5° C./sec. ramp rate with continuous plate reads. Each Untreated/Treated qPCR reaction pair was performed in duplicate. The difference in the cycle number at which amplification crossed threshold (delta Ct) was calculated for each Untreated/Treated qPCR reaction pair by subtracting the Ct of the Untreated Portion from the Ct of the Treated Portion. Because McrBC-mediated cleavage between the two primers increases the Ct of the Treated Portion, increasing delta Ct values reflect increasing measurements of local DNA methylation densities. The average delta Ct between the two replicate Untreated/Treated qPCR reactions was calculated, as well as the standard deviation between the two delta Ct values.

[0151] Table 5 indicates the percent sensitivity and specificity for each locus. Gain biomarkers are biomarkers that show more methylation in tumor samples than normal samples and loss biomarkers show conversely. For gain biomarkers, sensitivity reflects the frequency of scoring a known tumor sample as positive for DNA methylation at each locus while specificity reflects the frequency of scoring a known normal sample as negative for DNA methylation at each locus. For loss biomarkers, sensitivity reflects the frequency of scoring a known tumor sample as negative for DNA methylation at each locus while specificity reflects the frequency of scoring a known normal sample as positive for DNA methylation at each locus. Receiver-operator characteristic analysis (Lasko, et al. (2005) Journal of Biomedical Informatics 38 (5):404-415.) was used to determine empirical threshold values for classifying tissue samples. The analysis was performed independently for each locus. Percent sensitivity of gain biomarkers was calculated as the number of tumor samples with an average delta Ct greater than the threshold divided by the total number of tumor samples analyzed for that locus (i.e., excluding any measurements with a standard deviation between qPCR replicates >1 cycle)×100. Percent specificity of gain biomarkers was calculated as (1−(the number of normal samples with an average delta Ct greater than the threshold divided by the total number of normal samples analyzed for that locus))×100. The sensitivity and specificity of loss biomarkers was calculated using the number of samples below the threshold. Resulting sensitivity and specificity calculations are shown in Table 5. The sensitivity and specificity of the differential DNA methylation status of any given locus may be increased by further optimization of the precise local genetic region interrogated by a DNA methylation-sensing assay.

TABLE 5
Sensitivity and specificity of differentially methylated loci in a panel of 24
breast tumor samples and 25 histologically normal breast samples.

| Locus | | | | Difference in | | |
|---|---|---|---|---|---|---|
| Number | Feature Name | Type | Threshold | Medians (T − N) | Sensitivity | Specificity |
| 1 | ha1c_00037 | Gain | 1.995 | 1.255 | 69.57% | 96.00% |
| 2 | ha1g_01283 | Gain | 0.555 | 0.235 | 33.33% | 95.83% |
| 3 | ha1g_01465 | Gain | 0.54 | 0 | 20.83% | 96.00% |
| 4 | ha1g_02335 | Gain | 1.87 | 1.625 | 75.00% | 92.00% |
| 5 | ha1g_04114 | Gain | 1.18 | 0 | 4.17% | 95.83% |
| 6 | ha1g_04194 | Gain | 0.515 | 1.16 | 79.17% | 95.83% |
| 7 | ha1p_05922 | Gain | 1.495 | 1.725 | 91.67% | 100.00% |
| 8 | ha1p_09663 | Gain | 1.205 | 0.6025 | 50.00% | 100.00% |
| 9 | ha1p_100558 | Gain | 0.805 | 0.36 | 33.33% | 91.67% |
| 10 | ha1p_10286 | Gain | 0.505 | 0.6675 | 66.67% | 92.00% |
| 11 | ha1p_108198 | Gain | 1.905 | 2.08 | 87.50% | 100.00% |
| 12 | ha1p_16916 | Loss | 3.445 | −2.3925 | 79.17% | 90.91% |
| 13 | ha1p_18823 | Gain | 0.605 | 0.155 | 23.81% | 90.91% |
| 14 | ha1p_22139 | Gain | 1.405 | 0.5475 | 45.83% | 90.91% |
| 15 | ha1p_26420 | Gain | 2.01 | 0.43 | 45.45% | 100.00% |
| 16 | ha1p_38800 | Gain | 2.52 | 0.905 | 66.67% | 92.00% |
| 17 | ha1p_41780 | Gain | 4.56 | 1.7675 | 77.27% | 90.91% |
| 18 | ha1p_42103 | Gain | 0.615 | 0 | 4.17% | 96.00% |
| 19 | ha1p_47490 | Gain | 1.18 | 2.9925 | 87.50% | 88.00% |
| 20 | ha1p_47995 | Loss | 4.28 | −1.9925 | 83.33% | 72.00% |
| 21 | ha1p_54181 | Gain | 0.715 | 0 | 22.22% | 100.00% |
| 22 | ha1p_57326 | Gain | 1.355 | 1.245 | 83.33% | 92.00% |
| 23 | ha1p_60271 | Gain | 0.59 | 0.155 | 50.00% | 88.89% |
| 24 | ha1p_62820 | Gain | 3.66 | 0.585 | 50.00% | 100.00% |
| 25 | ha1p_64271 | Gain | 0.51 | 0 | 20.83% | 100.00% |
| 26 | ha1p_69412 | Gain | 2.285 | 1.8275 | 91.67% | 90.91% |
| 27 | ha1p_70432 | Gain | 2.29 | 1.475 | 73.68% | 100.00% |
| 28 | ha1p_71854 | Gain | 3.335 | 1.0575 | 84.21% | 77.78% |
| 29 | ha1p_81638 | Gain | 0.555 | 0 | 20.83% | 100.00% |
| 30 | ha1p_86556 | Gain | 0.62 | 0.4075 | 55.00% | 95.00% |
| 31 | ha1p_91110 | Loss | 4.835 | −2.775 | 75.00% | 100.00% |
| 32 | ha1p_94558 | Gain | 1.485 | 0.5175 | 81.82% | 60.87% |
| 33 | ha1p_96544 | Gain | 3.36 | 2.09 | 53.85% | 100.00% |
| 34 | ha1p_97458 | Gain | 1.72 | 0.145 | 37.50% | 100.00% |
| 35 | ha1p_97786 | Gain | 0.625 | 0.32 | 46.15% | 87.50% |
| 36 | ha1p_98401 | Gain | 0.67 | 0.7775 | 62.50% | 96.00% |

### Example 3

### Validation of DNA Methylation Changes in a Large Number of Independent Lung Tumor and Histologically Normal Lung Samples

[0152] The differential DNA methylation status of 36 loci was further validated by analyzing an independent panel of 25 lung carcinoma and 35 histologically normal lung tissue samples. Each sample was split into two equal portions of 4 μg. One portion was digested with McrBC (Treated Portion) in a total volume of 200 μL including 1×NEB2 buffer (New England Biolabs), 0.1 mg/mL bovine serum albumin (New England Biolabs), 2 mM GTP (Roche) and 32 units McrBC (New England Biolabs). The second portion was mock treated under identical conditions, except that 3.2 μL sterile 50% glycerol was added instead of McrBC enzyme (Untreated Portion). Samples were incubated at 37° C. for approximately 12 hours, followed by incubation at 60° C. to inactivate the McrBC enzyme. qPCR reactions and data analysis were performed as described in Example 2.

[0153] Sensitivity and specificity were calculated using ROC analysis derived thresholds as described above. Table 6 indicates the percent sensitivity and specificity for each locus.

TABLE 6
Sensitivity and specificity of differentially methylated loci in a panel of
25 lung tumor samples and 35 histologically normal lung samples.

| Locus | | | | Difference in | | |
|---|---|---|---|---|---|---|
| Number | Feature Name | Type | Threshold | Medians (T − N) | Sensitivity | Specificity |
| 37 | ha1g_00353 | Gain | 0.5 | 0.11 | 36.00% | 97.14% |
| 38 | ha1p_00553 | Loss | 1.36 | −0.115 | 86.36% | 45.71% |
| 39 | ha1p_04444 | Gain | 1.2 | 0.225 | 52.17% | 79.41% |
| 40 | ha1p_07264 | Gain | 0.56 | 0.21 | 48.00% | 100.00% |
| 41 | ha1p_08159 | Loss | 5.45 | −2.95 | 96.00% | 65.71% |
| 42 | ha1p_103437 | Loss | 5.44 | −2.94 | 80.00% | 82.86% |
| 43 | ha1p_105187 | Gain | 1.76 | 0.555 | 72.00% | 88.57% |
| 44 | ha1p_105778 | Gain | 2.58 | 0.475 | 56.00% | 85.29% |
| 45 | ha1p_10757 | Gain | 1.1 | 1.495 | 76.00% | 91.43% |
| 46 | ha1p_108911 | Loss | 1.36 | −0.425 | 60.00% | 88.57% |
| 47 | ha1p_111312 | Loss | 1.37 | −0.73 | 88.00% | 94.12% |
| 48 | ha1p_12483 | Gain | 2.65 | 0.115 | 32.00% | 88.57% |
| 49 | ha1p_16097 | Gain | 0.5 | 0 | 32.00% | 94.29% |
| 50 | ha1p_27029 | Gain | 0.69 | 0.61 | 54.17% | 88.57% |
| 51 | ha1p_29823 | Gain | 0.6 | 0.655 | 60.00% | 94.29% |
| 52 | ha1p_40588 | Gain | 0.62 | 0.33 | 48.00% | 85.29% |
| 53 | ha1p_45692 | Loss | 3.53 | −1.51 | 86.96% | 90.91% |
| 54 | ha1p_47429 | Gain | 1.04 | 0.665 | 68.00% | 97.14% |
| 55 | ha1p_49581 | Gain | 0.82 | 0.39 | 68.00% | 88.57% |
| 56 | ha1p_55371 | Loss | 0.83 | −0.56 | 84.00% | 51.43% |
| 57 | ha1p_58788 | Gain | 0.63 | 0.57 | 44.00% | 97.14% |
| 58 | ha1p_59216 | Gain | 2.07 | 0.01 | 17.39% | 100.00% |
| 59 | ha1p_61568 | Gain | 1.65 | 1.375 | 50.00% | 96.43% |
| 60 | ha1p_61745 | Loss | 2.31 | −0.88 | 60.87% | 80.00% |
| 61 | ha1p_62060 | Gain | 1.99 | 0.75 | 54.17% | 88.57% |
| 62 | ha1p_62154 | Gain | 0.83 | 0.29 | 52.00% | 91.43% |
| 63 | ha1p_62869 | Gain | 0.54 | 0.315 | 52.00% | 88.57% |
| 64 | ha1p_64529 | Gain | 4.27 | 1.865 | 91.30% | 75.76% |
| 65 | ha1p_77581 | Gain | 0.6 | 0.725 | 62.50% | 97.14% |
| 66 | ha1p_78965 | Gain | 0.5 | 0.32 | 37.50% | 94.29% |
| 67 | ha1p_80400 | Gain | 5.95 | 0 | 88.00% | 25.71% |
| 68 | ha1p_81949 | Gain | 0.87 | 0.38 | 62.50% | 74.29% |
| 69 | ha1p_82549 | Gain | 1.06 | 0.16 | 44.00% | 82.86% |
| 70 | ha1p_84580 | Loss | 1.32 | −0.93 | 72.00% | 88.24% |
| 71 | ha1p_86042 | Loss | 1.11 | 0.09 | 100.00% | 24.24% |
| 72 | ha1p_95305 | Loss | 3.94 | −1.655 | 84.00% | 82.86% |

### Example 4

### Validation of DNA Methylation Changes in a Large Number of Independent Ovarian Tumor and Histologically Normal Ovarian Samples

[0154] The differential DNA methylation status of 24 loci was further validated by analyzing an independent panel of 23 ovarian carcinoma and 25 histologically normal ovarian tissue samples. The normal ovarian tissues included in this panel were obtained from oophorectomies unrelated to ovarian cancer. Each sample was split into two equal portions of 4 μg. One portion was digested with McrBC (Treated Portion) in a total volume of 200 μL including 1×NEB2 buffer (New England Biolabs), 0.1 mg/mL bovine serum albumin (New England Biolabs), 2 mM GTP (Roche) and 32 units McrBC (New England Biolabs). The second portion was mock treated under identical conditions, except that 3.2 μL sterile 50% glycerol was added instead of McrBC enzyme (Untreated Portion). Samples were incubated at 37° C. for approximately 12 hours, followed by incubation at 60° C. to inactivate the McrBC enzyme. qPCR reactions and data analysis were performed as described in Example 2.

[0155] Sensitivity and specificity were calculated using ROC analysis derived thresholds as described above. Table 7 indicates the percent sensitivity and specificity for each locus.

TABLE 7
Sensitivity and specificity of differentially methylated loci in a panel of 23
ovarian tumor samples and 25 histologically normal ovarian samples.

| Locus | | | | Difference in | | |
|---|---|---|---|---|---|---|
| Number | Feature Name | Type | Threshold | Medians (T − N) | Sensitivity | Specificity |
| 73 | CHR01P152508183 | Gain | 2.29 | 0.65 | 60.87% | 65.22% |
| 74 | CHR02P046721735 | Gain | 2.86 | 2.495 | 73.91% | 96.00% |
| 75 | CHR04P001292657 | Loss | 4.92 | −1.3025 | 63.64% | 84.00% |
| 76 | CHR05P043085585 | Loss | 0.54 | −0.895 | 95.65% | 76.00% |
| 77 | CHR08P097127672 | Gain | 0.745 | 0.3675 | 50.00% | 95.83% |
| 78 | CHR08P102461728 | Loss | 2.595 | −4.415 | 95.45% | 100.00% |
| 79 | CHR08P143804195 | Gain | 5.56 | 1.67 | 52.17% | 92.00% |
| 80 | CHR09P021979668 | Gain | 2.39 | 0.915 | 52.17% | 95.65% |
| 81 | CHR09P067743642 | Gain | 0.85 | 0.935 | 59.09% | 84.00% |
| 82 | CHR11P010436241 | Loss | 5.335 | −3.61 | 90.91% | 84.00% |
| 83 | CHR11P117233022 | Gain | 1.39 | 0.695 | 56.52% | 82.61% |
| 84 | CHR12P044081945 | Gain | 3.4 | 0.94 | 45.45% | 96.00% |
| 85 | CHR13P042532794 | Gain | 3.045 | 0.005 | 30.43% | 91.30% |
| 86 | CHR14P049549993 | Loss | 1.72 | −0.22 | 84.62% | 41.18% |
| 87 | CHR15P062682028 | Gain | 3.185 | 2.1875 | 80.95% | 77.27% |
| 88 | CHR16P070471895 | Loss | 0.855 | 0.07 | 66.67% | 42.86% |
| 89 | CHR17P007309455 | Loss | 0.53 | −0.4075 | 66.67% | 66.67% |
| 90 | CHR19P047620296 | Gain | 1.78 | 1.4125 | 73.91% | 75.00% |
| 91 | CHR19P054350430 | Gain | 2.19 | 0.455 | 69.57% | 60.87% |
| 92 | CHR19P059796623 | Loss | 4.96 | −3.075 | 91.30% | 79.17% |
| 93 | CHR20P038041321 | Gain | 0.55 | 0.325 | 43.48% | 100.00% |
| 94 | ha1p_108204_150 | Gain | 0.87 | 0.875 | 54.55% | 92.00% |
| 95 | ha1p_48631_150 | Loss | 5.855 | −4.595 | 90.91% | 95.83% |
| 96 | ha1p_94692_150 | Gain | 2.13 | 1.4975 | 55.00% | 90.48% |

### Example 5

### Analysis of Loci Discovered to be Differentially DNA Methylated in Breast Cancer Among Lung and Ovarian Tumor and Histologically Normal Samples

[0156] The differential DNA methylation status of 36 loci found to be differentially DNA methylated in breast tumors relative to histologically normal breast samples (Table 5) was monitored in a randomly selected panel of 10 lung tumor samples and 10 histologically normal lung samples (Table 8). The same loci were analyzed in a randomly selected panel of 10 ovarian tumor samples and 10 histologically normal ovary samples (Table 9). Each sample was split into two equal portions of 3 μg. One portion was digested with McrBC (Treated Portion) in a total volume of 150 μL including 1×NEB2 buffer (New England Biolabs), 0.1 mg/mL bovine serum albumin (New England Biolabs), 2 mM GTP (Roche) and 48 units McrBC (New England Biolabs). The second portion was mock treated under identical conditions, except that 4.8 μL sterile 50% glycerol was added instead of McrBC enzyme (Untreated Portion). Samples were incubated at 37° C. for approximately 12 hours, followed by incubation at 60° C. to inactivate the McrBC enzyme. qPCR reactions and data analysis were performed as described in Example 2.

[0157] Sensitivity and specificity were calculated using ROC analysis derived thresholds as described above. Table 8 indicates the percent sensitivity and specificity for each locus analyzed in the panel of lung tumor and histologically normal lung samples. Table 9 indicates the percent sensitivity and specificity for each locus analyzed in the panel of ovarian tumor and histologically normal ovary samples. The number of samples scoring as positive for the methylation change among the analyzed tumor samples is indicated (Sensitivity (n of n)). For example, “7 of 10” indicates that seven tumor samples scored in the positive range as determined by ROC based average dCt thresholds (Threshold) among a total of 10 tumor samples analyzed. The number of samples scoring as negative for the methylation change among the analyzed histologically normal samples is also indicated (Specificity (n of n)).

TABLE 8
Sensitivity and specificity of loci identified as differentially methylated in breast tumors among
a panel of 10 lung tumor samples and 10 histologically normal lung samples.

| | | | | Difference | | | | |
|---|---|---|---|---|---|---|---|---|
| Locus | Feature | | | in Medians | | | Sensitivity | Specificity |
| Number | Name | Type | Threshold | (T − N) | Sensitivity | Specificity | (n of n) | (n of n) |
| 1 | ha1c_00037 | Gain | 3.155 | 0.7375 | 70.00% | 100.00% | 7 of 10 | 10 of 10 |
| 2 | ha1g_01283 | Gain | 0.58 | 0.505 | 90.00% | 100.00% | 9 of 10 | 10 of 10 |
| 3 | ha1g_01465 | Gain | 0.555 | 0.34 | 50.00% | 100.00% | 5 of 10 | 10 of 10 |
| 4 | ha1g_02335 | Gain | 1.985 | 0.875 | 60.00% | 100.00% | 6 of 10 | 10 of 10 |
| 5 | ha1g_04114 | Gain | 0.57 | 0.16 | 20.00% | 100.00% | 2 of 10 | 10 of 10 |
| 6 | ha1g_04194 | Gain | 1.47 | 0.7275 | 80.00% | 100.00% | 8 of 10 | 10 of 10 |
| 7 | ha1p_05922 | Gain | 3.645 | 0.575 | 60.00% | 100.00% | 6 of 10 | 10 of 10 |
| 8 | ha1p_09663 | Gain | 0.5 | 0.3475 | 60.00% | 100.00% | 6 of 10 | 10 of 10 |
| 9 | ha1p_100558 | Gain | 0.665 | 0.495 | 77.78% | 77.78% | 7 of 9 | 7 of 9 |
| 10 | ha1p_10286 | Gain | 0.655 | 0.7575 | 60.00% | 100.00% | 6 of 10 | 10 of 10 |
| 11 | ha1p_108198 | Gain | 4.265 | −0.0275 | 30.00% | 88.89% | 3 of 10 | 8 of 9 |
| 12 | ha1p_16916 | Loss | 4.73 | −2.32 | 90.00% | 100.00% | 9 of 10 | 10 of 10 |
| 13 | ha1p_18823 | Gain | 0.615 | 1.02 | 88.89% | 88.89% | 8 of 9 | 8 of 9 |
| 14 | ha1p_22139 | Loss | 2 | −0.155 | 60.00% | 77.78% | 6 of 10 | 7 of 9 |
| 15 | ha1p_26420 | Gain | 2.105 | 0.925 | 77.78% | 88.89% | 7 of 9 | 8 of 9 |
| 16 | ha1p_38800 | Gain | 1.94 | 0.8525 | 100.00% | 70.00% | 10 of 10 | 7 of 10 |
| 17 | ha1p_41780 | Gain | 4.625 | 2.1975 | 80.00% | 100.00% | 8 of 10 | 10 of 10 |
| 18 | ha1p_42103 | Gain | 0.65 | 0.1275 | 10.00% | 100.00% | 1 of 10 | 10 of 10 |
| 19 | ha1p_47490 | Gain | 5.215 | 1.6825 | 50.00% | 100.00% | 5 of 10 | 10 of 10 |
| 20 | ha1p_47995 | Loss | 2.835 | −0.265 | 30.00% | 100.00% | 3 of 10 | 10 of 10 |
| 21 | ha1p_54181 | Gain | 0.55 | 0.5875 | 60.00% | 77.78% | 6 of 10 | 7 of 9 |
| 22 | ha1p_57326 | Gain | 2.195 | 0.7325 | 70.00% | 100.00% | 7 of 10 | 10 of 10 |
| 23 | ha1p_60271 | Gain | 1.52 | 0.685 | 80.00% | 66.67% | 4 of 5 | 2 of 3 |
| 24 | ha1p_62820 | Gain | 4.545 | 1.235 | 80.00% | 90.00% | 8 of 10 | 9 of 10 |
| 25 | ha1p_64271 | Gain | 0.635 | 0.0675 | 20.00% | 100.00% | 2 of 10 | 10 of 10 |
| 26 | ha1p_69412 | Gain | 3.18 | 1.6225 | 90.00% | 100.00% | 9 of 10 | 10 of 10 |
| 27 | ha1p_70432 | Gain | 3.22 | 0.3175 | 60.00% | 100.00% | 6 of 10 | 10 of 10 |
| 28 | ha1p_71854 | Gain | 5.48 | 1.42 | 90.00% | 100.00% | 9 of 10 | 10 of 10 |
| 29 | ha1p_81638 | Gain | 1.05 | 0.2 | 20.00% | 100.00% | 2 of 10 | 10 of 10 |
| 30 | ha1p_86556 | Gain | 2.105 | 0.88 | 88.89% | 83.33% | 8 of 9 | 5 of 6 |
| 31 | ha1p_91110 | Loss | 6 | −0.83 | 60.00% | 100.00% | 6 of 10 | 10 of 10 |
| 32 | ha1p_94558 | Gain | 0.71 | 0.57 | 90.00% | 70.00% | 9 of 10 | 7 of 10 |
| 33 | ha1p_96544 | Gain | 5.795 | 0.9375 | 80.00% | 90.00% | 8 of 10 | 9 of 10 |
| 34 | ha1p_97458 | Gain | 1.145 | 0.44 | 80.00% | 60.00% | 8 of 10 | 6 of 10 |
| 35 | ha1p_97786 | Gain | 0.82 | 1.045 | 85.71% | 100.00% | 6 of 7 | 2 of 2 |
| 36 | ha1p_98401 | Gain | 0.79 | 0.7625 | 70.00% | 100.00% | 7 of 10 | 10 of 10 |

TABLE 9
Sensitivity and specificity of loci identified as differentially methylated in breast tumors
among a panel of 10 ovarian tumor samples and 10 histologically normal ovary samples.

| | | | | Difference | | | | |
|---|---|---|---|---|---|---|---|---|
| Locus | | | | in Medians | | | Sensitivity | Specificity |
| Number | Feature Name | Type | Threshold | (T − N) | Sensitivity | Specificity | (n of n) | (n of n) |
| 1 | ha1c_00037 | Gain | 2.47 | 0.615 | 70.00% | 70.00% | 7 of 10 | 7 of 10 |
| 2 | ha1g_01283 | Gain | 1.13 | 0.1575 | 30.00% | 90.00% | 3 of 10 | 9 of 10 |
| 3 | ha1g_01465 | Loss | 0.795 | −0.0625 | 90.00% | 20.00% | 9 of 10 | 2 of 10 |
| 4 | ha1g_02335 | Gain | 5.265 | 1.405 | 60.00% | 90.00% | 6 of 10 | 9 of 10 |
| 5 | ha1g_04114 | Loss | 0.74 | −0.465 | 80.00% | 50.00% | 8 of 10 | 5 of 10 |
| 6 | ha1g_04194 | Gain | 0.865 | 2.385 | 90.00% | 80.00% | 9 of 10 | 8 of 10 |
| 7 | ha1p_05922 | Gain | 1.88 | 1.9475 | 80.00% | 90.00% | 8 of 10 | 9 of 10 |
| 8 | ha1p_09663 | Gain | 1.6 | 0.0375 | 20.00% | 90.00% | 2 of 10 | 9 of 10 |
| 9 | ha1p_100558 | Gain | 0.515 | 0.115 | 20.00% | 100.00% | 2 of 10 | 9 of 9 |
| 10 | ha1p_10286 | Gain | 0.93 | 0.075 | 70.00% | 50.00% | 7 of 10 | 5 of 10 |
| 11 | ha1p_108198 | Loss | 1.12 | −0.365 | 33.33% | 100.00% | 3 of 9 | 10 of 10 |
| 12 | ha1p_16916 | Loss | 4.005 | −3.5475 | 88.89% | 90.00% | 8 of 9 | 9 of 10 |
| 13 | ha1p_18823 | Gain | 2.175 | 0.145 | 11.11% | 100.00% | 1 of 9 | 9 of 9 |
| 14 | ha1p_22139 | Gain | 0.595 | 0.55 | 77.78% | 55.56% | 7 of 9 | 5 of 9 |
| 15 | ha1p_26420 | Gain | 1.49 | 1.8675 | 70.00% | 87.50% | 7 of 10 | 7 of 8 |
| 16 | ha1p_38800 | Gain | 2.68 | 0.7075 | 50.00% | 90.00% | 5 of 10 | 9 of 10 |
| 17 | ha1p_41780 | Gain | 4.41 | 0.815 | 77.78% | 60.00% | 7 of 9 | 6 of 10 |
| 18 | ha1p_42103 | Loss | 0.79 | −0.1325 | 100.00% | 20.00% | 10 of 10 | 2 of 10 |
| 19 | ha1p_47490 | Gain | 4.815 | −0.3125 | 40.00% | 100.00% | 4 of 10 | 10 of 10 |
| 20 | ha1p_47995 | Loss | 4.1 | −0.9275 | 70.00% | 80.00% | 7 of 10 | 8 of 10 |
| 21 | ha1p_54181 | Gain | 1.385 | 0 | 12.50% | 100.00% | 1 of 8 | 9 of 9 |
| 22 | ha1p_57326 | Gain | 1.485 | 0.38 | 66.67% | 80.00% | 6 of 9 | 8 of 10 |
| 23 | ha1p_60271 | Gain | 0.635 | 0.635 | 60.00% | 100.00% | 3 of 5 | 1 of 1 |
| 24 | ha1p_62820 | Gain | 5.055 | −0.0275 | 40.00% | 100.00% | 4 of 10 | 10 of 10 |
| 25 | ha1p_64271 | Loss | 0.8 | −0.035 | 90.00% | 10.00% | 9 of 10 | 1 of 10 |
| 26 | ha1p_69412 | Loss | 4.18 | −0.4425 | 50.00% | 100.00% | 5 of 10 | 10 of 10 |
| 27 | ha1p_70432 | Loss | 3.465 | −0.24 | 60.00% | 90.00% | 6 of 10 | 9 of 10 |
| 28 | ha1p_71854 | Gain | 2.915 | 2.82 | 66.67% | 90.00% | 6 of 9 | 9 of 10 |
| 29 | ha1p_81638 | Gain | 0.505 | 0.1525 | 40.00% | 90.00% | 4 of 10 | 9 of 10 |
| 30 | ha1p_86556 | Gain | 1.7 | 0.5475 | 50.00% | 83.33% | 4 of 8 | 5 of 6 |
| 31 | ha1p_91110 | Loss | 6 | −2.2825 | 80.00% | 87.50% | 8 of 10 | 7 of 8 |
| 32 | ha1p_94558 | Gain | 0.82 | 0.2025 | 50.00% | 80.00% | 5 of 10 | 8 of 10 |
| 33 | ha1p_96544 | Loss | 5.36 | −0.1 | 30.00% | 90.00% | 3 of 10 | 9 of 10 |
| 34 | ha1p_97458 | Loss | 1.475 | −0.5075 | 70.00% | 70.00% | 7 of 10 | 7 of 10 |
| 35 | ha1p_97786 | Gain | 0.52 | 0.085 | 28.57% | 100.00% | 2 of 7 | 4 of 4 |
| 36 | ha1p_98401 | Gain | 2.13 | 0.025 | 30.00% | 90.00% | 3 of 10 | 9 of 10 |

### Example 6

### Analysis of Loci Discovered to be Differentially DNA methylated in lung Cancer Among Breast and Ovarian Tumor and Histologically Normal Samples

[0158] The differential DNA methylation status of 36 loci found to be differentially DNA methylated in lung tumors relative to histologically normal lung samples (Table 6) was monitored in a randomly selected panel of 10 breast tumor samples and 10 histologically normal breast samples (Table 10). The same loci were analyzed in a randomly selected panel of 10 ovarian tumor samples and 10 histologically normal ovary samples (Table 11). Each sample was split into two equal portions of 3 μg. One portion was digested with McrBC (Treated Portion) in a total volume of 150 μL including 1×NEB2 buffer (New England Biolabs), 0.1 mg/mL bovine serum albumin (New England Biolabs), 2 mM GTP (Roche) and 48 units McrBC (New England Biolabs). The second portion was mock treated under identical conditions, except that 4.8 μL sterile 50% glycerol was added instead of McrBC enzyme (Untreated Portion). Samples were incubated at 37° C. for approximately 12 hours, followed by incubation at 60° C. to inactivate the McrBC enzyme. qPCR reactions and data analysis were performed as described in Example 2.

[0159] Sensitivity and specificity were calculated using ROC analysis derived thresholds as described above. Table 10 indicates the percent sensitivity and specificity for each locus analyzed in the panel of breast tumor and histologically normal breast samples. Table 11 indicates the percent sensitivity and specificity for each locus analyzed in the panel of ovarian tumor and histologically normal ovary samples. The number of samples scoring as positive for the methylation change among the analyzed tumor samples is indicated (Sensitivity (n of n)). For example, “7 of 10” indicates that seven tumor samples scored in the positive range as determined by ROC based average dCt thresholds (Threshold) among a total of 10 tumor samples analyzed. The number of samples scoring as negative for the methylation change among the analyzed histologically normal samples is also indicated (Specificity (n of n)).

TABLE 10
Sensitivity and specificity of loci identified as differentially methylated in lung tumors
among a panel of 10 breast tumor samples and 10 histologically normal breast samples.

| Locus | | | | Difference in | | | Sensitivity | Specificity |
|---|---|---|---|---|---|---|---|---|
| Number | Feature Name | Type | Threshold | Medians (T − N) | Sensitivity | Specificity | (n of n) | (n of n) |
| 37 | ha1g_00353 | Gain | 1.065 | 0.44 | 30.00% | 100.00% | 3 of 10 | 10 of 10 |
| 38 | ha1p_00553 | Loss | 1.6 | −0.065 | 90.00% | 40.00% | 9 of 10 | 4 of 10 |
| 39 | ha1p_04444 | Loss | 1.15 | −0.445 | 80.00% | 60.00% | 8 of 10 | 6 of 10 |
| 40 | ha1p_07264 | Gain | 0.805 | 0.3275 | 50.00% | 70.00% | 5 of 10 | 7 of 10 |
| 41 | ha1p_08159 | Loss | 6 | −0.415 | 90.00% | 20.00% | 9 of 10 | 2 of 10 |
| 42 | ha1p_103437 | Gain | 3.925 | 0.4375 | 100.00% | 40.00% | 10 of 10 | 4 of 10 |
| 43 | ha1p_105187 | Gain | 1.525 | 0.885 | 60.00% | 90.00% | 6 of 10 | 9 of 10 |
| 44 | ha1p_105778 | Loss | 1.745 | −1.6175 | 50.00% | 90.00% | 5 of 10 | 9 of 10 |
| 45 | ha1p_10757 | Gain | 1.475 | 2.1475 | 100.00% | 80.00% | 10 of 10 | 8 of 10 |
| 46 | ha1p_108911 | Loss | 1.475 | −0.47 | 60.00% | 60.00% | 6 of 10 | 6 of 10 |
| 47 | ha1p_111312 | Loss | 2.875 | −0.365 | 90.00% | 50.00% | 9 of 10 | 5 of 10 |
| 48 | ha1p_12483 | Gain | 2.26 | 0.4225 | 90.00% | 50.00% | 9 of 10 | 5 of 10 |
| 49 | ha1p_16097 | Gain | 0.54 | 0.3375 | 40.00% | 90.00% | 4 of 10 | 9 of 10 |
| 50 | ha1p_27029 | Gain | 1.925 | 0.9975 | 60.00% | 90.00% | 6 of 10 | 9 of 10 |
| 51 | ha1p_29823 | Gain | 0.685 | 0.485 | 60.00% | 70.00% | 6 of 10 | 7 of 10 |
| 52 | ha1p_40588 | Gain | 0.62 | 0.3325 | 50.00% | 70.00% | 5 of 10 | 7 of 10 |
| 53 | ha1p_45692 | Loss | 2.64 | −0.48 | 20.00% | 100.00% | 2 of 10 | 10 of 10 |
| 54 | ha1p_47429 | Gain | 1.48 | 0.97 | 70.00% | 90.00% | 7 of 10 | 9 of 10 |
| 55 | ha1p_49581 | Loss | 1.665 | −0.3725 | 80.00% | 50.00% | 8 of 10 | 5 of 10 |
| 56 | ha1p_55371 | Gain | 0.94 | 0.4025 | 90.00% | 50.00% | 9 of 10 | 5 of 10 |
| 57 | ha1p_58788 | Loss | 0.8 | −1.13 | 60.00% | 100.00% | 3 of 5 | 10 of 10 |
| 58 | ha1p_59216 | Gain | 2.14 | 1.16 | 66.67% | 88.89% | 6 of 9 | 8 of 9 |
| 59 | ha1p_61568 | Gain | 1.595 | 1.1975 | 66.67% | 100.00% | 4 of 6 | 6 of 6 |
| 60 | ha1p_61745 | Gain | 2.355 | 0.605 | 80.00% | 80.00% | 8 of 10 | 8 of 10 |
| 61 | ha1p_62060 | Gain | 1.335 | 1.145 | 80.00% | 60.00% | 8 of 10 | 6 of 10 |
| 62 | ha1p_62154 | Gain | 2.015 | −0.055 | 20.00% | 100.00% | 2 of 10 | 10 of 10 |
| 63 | ha1p_62869 | Gain | 1.265 | 0.7 | 90.00% | 60.00% | 9 of 10 | 6 of 10 |
| 64 | ha1p_64529 | Gain | 6 | 0 | 100.00% | 33.33% | 9 of 9 | 3 of 9 |
| 65 | ha1p_77581 | Gain | 0.615 | 0.9425 | 100.00% | 70.00% | 10 of 10 | 7 of 10 |
| 66 | ha1p_78965 | Gain | 1.065 | 0.065 | 60.00% | 60.00% | 6 of 10 | 6 of 10 |
| 67 | ha1p_80400 | Gain | 6 | 0 | 100.00% | 28.57% | 8 of 8 | 2 of 7 |
| 68 | ha1p_81949 | Gain | 0.715 | 0.59 | 100.00% | 70.00% | 10 of 10 | 7 of 10 |
| 69 | ha1p_82549 | Gain | 0.93 | 1.2775 | 100.00% | 60.00% | 10 of 10 | 6 of 10 |
| 70 | ha1p_84580 | Loss | 1.115 | −0.245 | 42.86% | 90.00% | 3 of 7 | 9 of 10 |
| 71 | ha1p_86042 | Gain | 0.63 | 0.1525 | 100.00% | 40.00% | 10 of 10 | 4 of 10 |
| 72 | ha1p_95305 | Gain | 3.26 | 0.8175 | 70.00% | 60.00% | 7 of 10 | 6 of 10 |

TABLE 11
Sensitivity and specificity of loci identified as differentially methylated in lung tumors
among a panel of 10 ovarian tumor samples and 10 histologically normal ovary samples.

| Locus | | | | Difference in | | | | |
|---|---|---|---|---|---|---|---|---|
| Number | Feature Name | Type | Threshold | Medians (T − N) | Sensitivity | Specificity | Sensitivity | Specificity |
| 37 | ha1g_00353 | Gain | 0.56 | 1.295 | 66.67% | 100.00% | 6 of 9 | 10 of 10 |
| 38 | ha1p_00553 | Loss | 0.9 | −0.3775 | 90.00% | 40.00% | 9 of 10 | 4 of 10 |
| 39 | ha1p_04444 | Gain | 0.65 | 0.195 | 50.00% | 90.00% | 5 of 10 | 9 of 10 |
| 40 | ha1p_07264 | Gain | 0.65 | 0.3225 | 50.00% | 100.00% | 5 of 10 | 10 of 10 |
| 41 | ha1p_08159 | Loss | 5.495 | −2.2775 | 88.89% | 80.00% | 8 of 9 | 8 of 10 |
| 42 | ha1p_103437 | Loss | 2.535 | −0.9 | 40.00% | 100.00% | 4 of 10 | 10 of 10 |
| 43 | ha1p_105187 | Gain | 0.8 | 0.88 | 90.00% | 90.00% | 9 of 10 | 9 of 10 |
| 44 | ha1p_105778 | Gain | 1.525 | 0.655 | 50.00% | 100.00% | 5 of 10 | 10 of 10 |
| 45 | ha1p_10757 | Gain | 1.57 | 2.235 | 70.00% | 100.00% | 7 of 10 | 10 of 10 |
| 46 | ha1p_108911 | Gain | 1.675 | 0.1525 | 60.00% | 70.00% | 6 of 10 | 7 of 10 |
| 47 | ha1p_111312 | Gain | 1.885 | 0.7375 | 60.00% | 100.00% | 6 of 10 | 10 of 10 |
| 48 | ha1p_12483 | Gain | 4.095 | −0.215 | 40.00% | 80.00% | 4 of 10 | 8 of 10 |
| 49 | ha1p_16097 | Gain | 1.12 | 0.0575 | 30.00% | 100.00% | 3 of 10 | 10 of 10 |
| 50 | ha1p_27029 | Gain | 0.69 | 1.85 | 80.00% | 100.00% | 8 of 10 | 10 of 10 |
| 51 | ha1p_29823 | Gain | 0.85 | 0.48 | 50.00% | 100.00% | 5 of 10 | 10 of 10 |
| 52 | ha1p_40588 | Gain | 0.57 | 0.34 | 22.22% | 100.00% | 2 of 9 | 10 of 10 |
| 53 | ha1p_45692 | Loss | 5.855 | −0.71 | 60.00% | 100.00% | 6 of 10 | 10 of 10 |
| 54 | ha1p_47429 | Gain | 0.72 | 0.97 | 90.00% | 100.00% | 9 of 10 | 10 of 10 |
| 55 | ha1p_49581 | Loss | 0.795 | −0.2 | 30.00% | 90.00% | 3 of 10 | 9 of 10 |
| 56 | ha1p_55371 | Gain | 1 | 0.28 | 70.00% | 70.00% | 7 of 10 | 7 of 10 |
| 57 | ha1p_58788 | Gain | 1.18 | 1.7525 | 90.00% | 100.00% | 9 of 10 | 10 of 10 |
| 58 | ha1p_59216 | Gain | 1.93 | 1.3275 | 70.00% | 100.00% | 7 of 10 | 10 of 10 |
| 59 | ha1p_61568 | Gain | 2.875 | 3.595 | 83.33% | 80.00% | 5 of 6 | 4 of 5 |
| 60 | ha1p_61745 | Gain | 1.455 | 1.445 | 90.00% | 100.00% | 9 of 10 | 10 of 10 |
| 61 | ha1p_62060 | Gain | 5.235 | 1.47 | 44.44% | 100.00% | 4 of 9 | 10 of 10 |
| 62 | ha1p_62154 | Gain | 0.895 | 0.08 | 30.00% | 100.00% | 3 of 10 | 10 of 10 |
| 63 | ha1p_62869 | Gain | 0.535 | 1.49 | 80.00% | 100.00% | 8 of 10 | 9 of 9 |
| 64 | ha1p_64529 | Loss | 6 | 0 | 0.00% | 100.00% | 0 of 9 | 8 of 8 |
| 65 | ha1p_77581 | Gain | 1.235 | 0.18 | 44.44% | 100.00% | 4 of 9 | 10 of 10 |
| 66 | ha1p_78965 | Gain | 0.675 | 0.45 | 70.00% | 100.00% | 7 of 10 | 10 of 10 |
| 67 | ha1p_80400 | Loss | 6 | 0 | 14.29% | 100.00% | 1 of 7 | 8 of 8 |
| 68 | ha1p_81949 | Gain | 1.15 | 1.475 | 77.78% | 100.00% | 7 of 9 | 10 of 10 |
| 69 | ha1p_82549 | Gain | 2.385 | 0.895 | 66.67% | 100.00% | 6 of 9 | 10 of 10 |
| 70 | ha1p_84580 | Loss | 0.805 | −0.29 | 44.44% | 100.00% | 4 of 9 | 10 of 10 |
| 71 | ha1p_86042 | Loss | 1.05 | −0.165 | 33.33% | 100.00% | 3 of 9 | 10 of 10 |
| 72 | ha1p_95305 | Loss | 3.355 | 0.01 | 33.33% | 90.00% | 3 of 9 | 9 of 10 |

### Example 7

### Analysis of Loci Discovered to be Differentially DNA Methylated in Ovarian Cancer Among Breast and Lung Tumor and Histologically Normal Samples

[0160] The differential DNA methylation status of 24 loci found to be differentially DNA methylated in lung tumors relative to histologically normal lung samples (Table 7) was monitored in a randomly selected panel of 10 breast tumor samples and 10 histologically normal breast samples (Table 12). The same loci were analyzed in a randomly selected panel of 10 lung tumor samples and 10 histologically normal lung samples (Table 13). Each sample was split into two equal portions of 3 μg. One portion was digested with McrBC (Treated Portion) in a total volume of 150 μL including 1×NEB2 buffer (New England Biolabs), 0.1 mg/mL bovine serum albumin (New England Biolabs), 2 mM GTP (Roche) and 48 units McrBC (New England Biolabs). The second portion was mock treated under identical conditions, except that 4.8 μL sterile 50% glycerol was added instead of McrBC enzyme (Untreated Portion). Samples were incubated at 37° C. for approximately 12 hours, followed by incubation at 60° C. to inactivate the McrBC enzyme. qPCR reactions and data analysis were performed as described in Example 2.

[0161] Sensitivity and specificity were calculated using ROC analysis derived thresholds as described above. Table 12 indicates the percent sensitivity and specificity for each locus analyzed in the panel of breast tumor and histologically normal breast samples. Table 13 indicates the percent sensitivity and specificity for each locus analyzed in the panel of lung tumor and histologically normal lung samples. The number of samples scoring as positive for the methylation change among the analyzed tumor samples is indicated (Sensitivity (n of n)). For example, “7 of 10” indicates that seven tumor samples scored in the positive range as determined by ROC based average dCt thresholds (Threshold) among a total of 10 tumor samples analyzed. The number of samples scoring as negative for the methylation change among the analyzed histologically normal samples is also indicated (Specificity (n of n)).

[0162] As demonstrated in Tables 8-13, although a differential DNA methylation biomarker may have been initially discovered in an analysis of a particular cancer type, that biomarker has applications outside that specific cancer type. For example, the locus represented by Locus number 1 (hal c_{—}00037; DNA sequence region SEQ ID NO:385) was originally discovered in a microarray-based comparison of breast tumor and adjacent histologically normal breast tissue, and this differentially methylated locus was subsequently found to display approximately 70% sensitivity and 96% specificity for discriminating between breast tumor and normal breast tissue. However, the same locus also displayed 70% sensitivity and 100% specificity for discriminating between lung tumor and histologically normal lung tissue and 70% sensitivity and 70% specificity for discriminating between ovarian tumor and histologically normal ovary tissue. Therefore, DNA methylation based biomarkers initially identified in an analysis of a particular cancer type can be useful in the detection or diagnosis of additional cancer types.

TABLE 12
Sensitivity and specificity of loci identified as differentially methylated in ovarian tumors
among a panel of 10 breast tumor samples and 10 histologically normal breast samples.

| | | | | Difference | | | | |
|---|---|---|---|---|---|---|---|---|
| Locus | | | | in Medians | | | Sensitivity | Specificity |
| Number | Feature Name | Type | Threshold | (T − N) | Sensitivity | Specificity | (n of n) | (n of n) |
| 73 | CHR01P152508183 | Gain | 1.77 | 2.0225 | 100.00% | 70.00% | 10 of 10 | 7 of 10 |
| 74 | CHR02P046721735 | Gain | 5.06 | 3.09 | 90.00% | 90.00% | 9 of 10 | 9 of 10 |
| 75 | CHR04P001292657 | Gain | 6 | 0.32 | 100.00% | 55.56% | 9 of 9 | 5 of 9 |
| 76 | CHR05P043085585 | Loss | 1.11 | −0.24 | 100.00% | 40.00% | 10 of 10 | 4 of 10 |
| 77 | CHR08P097127672 | Gain | 0.61 | 0.84 | 80.00% | 70.00% | 8 of 10 | 7 of 10 |
| 78 | CHR08P102461728 | Loss | 2.82 | −0.0825 | 100.00% | 30.00% | 10 of 10 | 3 of 10 |
| 79 | CHR08P143804195 | Gain | 6 | 0 | 100.00% | 20.00% | 10 of 10 | 2 of 10 |
| 80 | CHR09P021979668 | Gain | 3.725 | 1.02 | 90.00% | 80.00% | 9 of 10 | 8 of 10 |
| 81 | CHR09P067743642 | Gain | 1.595 | 1.4075 | 100.00% | 62.50% | 9 of 9 | 5 of 8 |
| 82 | CHR11P010436241 | Gain | 2.59 | 1.595 | 80.00% | 70.00% | 8 of 10 | 7 of 10 |
| 83 | CHR11P117233022 | Gain | 2.95 | 1.075 | 100.00% | 70.00% | 10 of 10 | 7 of 10 |
| 84 | CHR12P044081945 | Gain | 3.135 | 2.015 | 80.00% | 90.00% | 8 of 10 | 9 of 10 |
| 85 | CHR13P042532794 | Gain | 2.775 | 1.5675 | 100.00% | 70.00% | 10 of 10 | 7 of 10 |
| 86 | CHR14P049549993 | Gain | 2.545 | 1.9625 | 100.00% | 60.00% | 10 of 10 | 6 of 10 |
| 87 | CHR15P062682028 | Gain | 6 | 0 | 100.00% | 40.00% | 7 of 7 | 2 of 5 |
| 88 | CHR16P070471895 | Gain | 1.9 | 0.66 | 85.71% | 60.00% | 6 of 7 | 6 of 10 |
| 89 | CHR17P007309455 | Loss | 1.795 | 0.235 | 100.00% | 33.33% | 3 of 3 | 1 of 3 |
| 90 | CHR19P047620296 | Gain | 5.77 | 1.155 | 100.00% | 70.00% | 10 of 10 | 7 of 10 |
| 91 | CHR19P054350430 | Gain | 3.29 | 1.61 | 90.00% | 70.00% | 9 of 10 | 7 of 10 |
| 92 | CHR19P059796623 | Loss | 4.205 | −0.9025 | 80.00% | 70.00% | 8 of 10 | 7 of 10 |
| 93 | CHR20P038041321 | Gain | 1.13 | 1.56 | 100.00% | 80.00% | 10 of 10 | 8 of 10 |
| 94 | ha1p_108204_l50 | Gain | 0.53 | −0.0925 | 77.78% | 37.50% | 7 of 9 | 3 of 8 |
| 95 | ha1p_48631_l50 | Loss | 1.075 | 1.1925 | 30.00% | 100.00% | 3 of 10 | 10 of 10 |
| 96 | ha1p_94692_l50 | Gain | 3.02 | 0.7575 | 50.00% | 90.00% | 4 of 8 | 9 of 10 |

[0163] Although the invention has been described in some detail by way of illustration and example for purposes of clarity of understanding, it will be readily apparent to one of ordinary skill in the art in light of the teachings of this invention that certain changes and modifications may be made thereto without departing from the spirit or scope of the appended claims.

[0164] All publications, databases, Genbank sequences, patents, and patent applications cited in this specification are herein incorporated by reference as if each was specifically and individually indicated to be incorporated by reference.

TABLE 13
Sensitivity and specificity of loci identified as differentially methylated in ovarian
tumors among a panel of 10 lung tumor samples and 10 histologically normal lung samples.

| Locus | | | | Difference in | | | Sensitivity | Specificity |
|---|---|---|---|---|---|---|---|---|
| Number | Feature Name | Type | Threshold | Medians (T − N) | Sensitivity | Specificity | (n of n) | (n of n) |
| 73 | CHR01P152508183 | Gain | 2.75 | 1.5475 | 80.00% | 90.00% | 8 of 10 | 9 of 10 |
| 74 | CHR02P046721735 | Gain | 2.98 | 0.56 | 70.00% | 90.00% | 7 of 10 | 9 of 10 |
| 75 | CHR04P001292657 | Gain | 6 | 0.4275 | 100.00% | 70.00% | 10 of 10 | 7 of 10 |
| 76 | CHR05P043085585 | Loss | 0.915 | 0.02 | 90.00% | 10.00% | 9 of 10 | 1 of 10 |
| 77 | CHR08P097127672 | Gain | 1.59 | 0.07 | 20.00% | 100.00% | 2 of 10 | 10 of 10 |
| 78 | CHR08P102461728 | Loss | 1.775 | −0.38 | 90.00% | 60.00% | 9 of 10 | 6 of 10 |
| 79 | CHR08P143804195 | Gain | 6 | 0 | 100.00% | 0.00% | 10 of 10 | 0 of 10 |
| 80 | CHR09P021979668 | Gain | 1.885 | 0.31 | 80.00% | 80.00% | 8 of 10 | 8 of 10 |
| 81 | CHR09P067743642 | Gain | 2.615 | 0.23 | 77.78% | 80.00% | 7 of 9 | 8 of 10 |
| 82 | CHR11P010436241 | Loss | 1.215 | −0.3875 | 40.00% | 100.00% | 4 of 10 | 10 of 10 |
| 83 | CHR11P117233022 | Gain | 2.65 | 0.0525 | 30.00% | 100.00% | 3 of 10 | 10 of 10 |
| 84 | CHR12P044081945 | Gain | 3.3 | 1.055 | 80.00% | 90.00% | 8 of 10 | 9 of 10 |
| 85 | CHR13P042532794 | Gain | 3.27 | 0.11 | 30.00% | 100.00% | 3 of 10 | 10 of 10 |
| 86 | CHR14P049549993 | Gain | 3.515 | 0.0275 | 30.00% | 100.00% | 3 of 10 | 10 of 10 |
| 87 | CHR15P062682028 | Loss | 5.9 | 0 | 12.50% | 100.00% | 1 of 8 | 7 of 7 |
| 88 | CHR16P070471895 | Loss | 1.89 | −0.43 | 70.00% | 77.78% | 7 of 10 | 7 of 9 |
| 89 | CHR17P007309455 | Loss | 3.245 | −2.3925 | 66.67% | 100.00% | 2 of 3 | 2 of 2 |
| 90 | CHR19P047620296 | Gain | 5.615 | 0.8275 | 90.00% | 90.00% | 9 of 10 | 9 of 10 |
| 91 | CHR19P054350430 | Gain | 3.48 | −0.035 | 40.00% | 80.00% | 4 of 10 | 8 of 10 |
| 92 | CHR19P059796623 | Loss | 3.505 | −1.0175 | 80.00% | 80.00% | 8 of 10 | 8 of 10 |
| 93 | CHR20P038041321 | Gain | 0.605 | 0.4175 | 80.00% | 70.00% | 8 of 10 | 7 of 10 |
| 94 | ha1p_108204_l50 | Loss | 1.54 | −0.2825 | 80.00% | 50.00% | 8 of 10 | 5 of 10 |
| 95 | ha1p_48631_l50 | Loss | 4.035 | −1.3975 | 60.00% | 90.00% | 6 of 10 | 9 of 10 |
| 96 | ha1p_94692_l50 | Gain | 3.15 | 0.115 | 55.56% | 66.67% | 5 of 9 | 6 of 9 |

What is claimed is:

1. A method for determining the methylation status of an individual, the method comprising:
obtaining a biological sample from an individual; and
determining the methylation status of at least one cytosine within a DNA region in a sample from the individual where the DNA region is at least 90% identical to a sequence selected from the group consisting of SEQ ID NO: 391, 385, 386, 387, 388, 389, 390, 392, 393, 394, 395, 396, 397, 398, 399, 400, 401, 402, 403, 404, 405, 406, 407, 408, 409, 410, 411, 412, 413, 414, 415, 416, 417, 418, 419, 420, 421, 422, 423, 424, 425, 426, 427, 428, 429, 430, 431, 432, 433, 434, 435, 436, 437, 438, 439, 440, 441, 442, 443, 444, 445, 446, 447, 448, 449, 450, 451, 452, 453, 454, 455, 456, 457, 458, 459, 460, 461, 462, 463, 464, 465, 466, 467, 468, 469, 470, 471, 472, 473, 474, 475, 476, 477, 478, 479, and 480.

2. The method of claim 1, wherein the determining step comprises determining the methylation status of at least one cytosine in the DNA region corresponding to a nucleotide in a biomarker, wherein the biomarker is at least 90% identical to a sequence selected from the group consisting of SEQ ID NO: 289, 290, 291, 292, 293, 294, 295, 296, 297, 298, 299, 300, 301, 302, 303, 304, 305, 306, 307, 308, 309, 310, 311, 312, 313, 314, 315, 316, 317, 318, 319, 320, 321, 322, 323, 324, 325, 326, 327, 328, 329, 330, 331, 332, 333, 334, 335, 336, 337, 338, 339, 340, 341, 342, 343, 344, 345, 346, 347, 348, 349, 350, 351, 352, 353, 354, 355, 356, 357, 358, 359, 360, 361, 362, 363, 364, 365, 366, 367, 368, 369, 370, 371, 372, 373, 374, 375, 376, 377, 378, 379, 380, 381, 382, 383, and 384.

3. The method of claim 2, wherein the determining step comprises determining the methylation status of the DNA region corresponding to the biomarker.

4. The method of claim 1, wherein the sample is from blood serum, blood plasma, urine, sputum, or tissue biopsy.

5. The method of claim 1, wherein the methylation status of at least one cytosine is compared to the methylation status of a control locus.

6. The method of claim 5, wherein the control locus is an endogenous control.

7. The method of claim 5, wherein the control locus is an exogenous control.

8. The method of claim 1, wherein the determining step comprises determining the methylation status of at least one cytosine in at least two DNA regions.

9. A method for determining the presence or absence of cancer in an individual, the method comprising:
a) determining the methylation status of at least one cytosine within a DNA region in a sample from the individual where the DNA region is at least 90% identical to a sequence selected from the group consisting of SEQ ID NO: 391, 385, 386, 387, 388, 389, 390, 392, 393, 394, 395, 396, 397, 398, 399, 400, 401, 402, 403, 404, 405, 406, 407, 408, 409, 410, 411, 412, 413, 414, 415, 416, 417, 418, 419, 420, 421, 422, 423, 424, 425, 426, 427, 428, 429, 430, 431, 432, 433, 434, 435, 436, 437, 438, 439, 440, 441, 442, 443, 444, 445, 446, 447, 448, 449, 450, 451, 452, 453, 454, 455, 456, 457, 458, 459, 460, 461, 462, 463, 464, 465, 466, 467, 468, 469, 470, 471, 472, 473, 474, 475, 476, 477, 478, 479, and 480;
b) comparing the methylation status of the at least one cytosine to a threshold value for the at least one cytosine, wherein the threshold value distinguishes between individuals with and without cancer, wherein the comparison of the methylation status to the threshold value is predictive of the presence or absence of cancer in the individual.

10. The method of claim 9, wherein the determining step comprises determining the methylation status of at least one cytosine in the DNA region corresponding to a nucleotide in a biomarker, wherein the biomarker is at least 90% identical to a sequence selected from the group consisting of SEQ ID NO: 289, 290, 291, 292, 293, 294, 295, 296, 297, 298, 299, 300, 301, 302, 303, 304, 305, 306, 307, 308, 309, 310, 311, 312, 313, 314, 315, 316, 317, 318, 319, 320, 321, 322, 323, 324, 325, 326, 327, 328, 329, 330, 331, 332, 333, 334, 335, 336, 337, 338, 339, 340, 341, 342, 343, 344, 345, 346, 347, 348, 349, 350, 351, 352, 353, 354, 355, 356, 357, 358, 359, 360, 361, 362, 363, 364, 365, 366, 367, 368, 369, 370, 371, 372, 373, 374, 375, 376, 377, 378, 379, 380, 381, 382, 383, and 384.

11. The method of claim 10, wherein the determining step comprises determining the methylation status of the DNA region corresponding to the biomarker.

12. The method of claim 9, wherein the sample is from blood serum, blood plasma, urine, sputum, or a tissue biopsy.

13. The method of claim 9, wherein the methylation status of at least one biomarker from the list is compared to the methylation value of a control locus.

14. The method of claim 13, wherein the control locus is an endogenous control.

15. The method of claim 13, wherein the control locus is an exogenous control.

16. The method of claim 9, wherein the determining step comprises determining the methylation status of at least one cytosine from at least two DNA regions.

17. A computer implemented method for determining the presence or absence of cancer in an individual, the method comprising:
receiving, at a host computer, a methylation value representing the methylation status of at least one cytosine within a DNA region in a sample from the individual where the DNA region is at least 90% identical to a sequence selected from the group consisting of SEQ ID NO: 391, 385, 386, 387, 388, 389, 390, 392, 393, 394, 395, 396, 397, 398, 399, 400, 401, 402, 403, 404, 405, 406, 407, 408, 409, 410, 411, 412, 413, 414, 415, 416, 417, 418, 419, 420, 421, 422, 423, 424, 425, 426, 427, 428, 429, 430, 431, 432, 433, 434, 435, 436, 437, 438, 439, 440, 441, 442, 443, 444, 445, 446, 447, 448, 449, 450, 451, 452, 453, 454, 455, 456, 457, 458, 459, 460, 461, 462, 463, 464, 465, 466, 467, 468, 469, 470, 471, 472, 473, 474, 475, 476, 477, 478, 479, and 480; and
comparing, in the host computer, the methylation value to a threshold value, wherein the threshold value distinguishes between individuals with and without cancer, wherein the comparison of the methylation value to the threshold value is predictive of the presence or absence of cancer in the individual.

18. The method of claim 17, wherein the receiving step comprises receiving at least two methylation values, the two methylation values representing the methylation status of at least one cytosine biomarker from two different DNA regions; and
the comparing step comprises comparing the methylation values to one or more threshold value(s) wherein the threshold value distinguishes between individuals with and without cancer, wherein the comparison of the methylation value to the threshold value is predictive of the presence or absence of cancer in the individual.

19. A computer program product for determining the presence or absence of cancer in an individual, the computer readable product comprising:
a computer readable medium encoded with program code, the program code including:
program code for receiving a methylation value representing the methylation status of at least one cytosine within a DNA region in a sample from the individual where the DNA region is at least 90% identical to a sequence selected from the group consisting of SEQ ID NO: 391, 385, 386, 387, 388, 389, 390, 392, 393, 394, 395, 396, 397, 398, 399, 400, 401, 402, 403, 404, 405, 406, 407, 408, 409, 410, 411, 412, 413, 414, 415, 416, 417, 418, 419, 420, 421, 422, 423, 424, 425, 426, 427, 428, 429, 430, 431, 432, 433, 434, 435, 436, 437, 438, 439, 440, 441, 442, 443, 444, 445, 446, 447, 448, 449, 450, 451, 452, 453, 454, 455, 456, 457, 458, 459, 460, 461, 462, 463, 464, 465, 466, 467, 468, 469, 470, 471, 472, 473, 474, 475, 476, 477, 478, 479, and 480; and
program code for comparing the methylation value to a threshold value, wherein the threshold value distinguishes between individuals with and without cancer, wherein the comparison of the methylation value to the threshold value is predictive of the presence or absence of cancer in the individual.

20. A kit for determining the methylation status of at least one biomarker, the kit comprising:
(1) a pair of polynucleotides capable of specifically amplifying at least a portion of a DNA region where the DNA region is at least 90% identical to a sequence selected from the group consisting of SEQ ID NO: 391, 385, 386, 387, 388, 389, 390, 392, 393, 394, 395, 396, 397, 398, 399, 400, 401, 402, 403, 404, 405, 406, 407, 408, 409, 410, 411, 412, 413, 414, 415, 416, 417, 418, 419, 420, 421, 422, 423, 424, 425, 426, 427, 428, 429, 430, 431, 432, 433, 434, 435, 436, 437, 438, 439, 440, 441, 442, 443, 444, 445, 446, 447, 448, 449, 450, 451, 452, 453, 454, 455, 456, 457, 458, 459, 460, 461, 462, 463, 464, 465, 466, 467, 468, 469, 470, 471, 472, 473, 474, 475, 476, 477, 478, 479, and 480; and
a methylation-dependent or methylation sensitive restriction enzyme and/or sodium bisulfite; or
(2) sodium bisulfite, primers and adapters for whole genome amplification, and polynucleotides to quantify the presence of the converted methylated and/or the converted unmethylated sequence of at least one cytosine from a DNA region that is at least 90% identical to a sequence selected from the group consisting of SEQ ID NO: 391, 385, 386, 387, 388, 389, 390, 392, 393, 394, 395, 396, 397, 398, 399, 400, 401, 402, 403, 404, 405, 406, 407, 408, 409, 410, 411, 412, 413, 414, 415, 416, 417, 418, 419, 420, 421, 422, 423, 424, 425, 426, 427, 428, 429, 430, 431, 432, 433, 434, 435, 436, 437, 438, 439, 440, 441, 442, 443, 444, 445, 446, 447, 448, 449, 450, 451, 452, 453, 454, 455, 456, 457, 458, 459, 460, 461, 462, 463, 464, 465, 466, 467, 468, 469, 470, 471, 472, 473, 474, 475, 476, 477, 478, 479, and 480; or
(3) methylation sensing restriction enzymes, primers and adapters for whole genome amplification, and polynucleotides to quantify the number of copies of at least a portion of a DNA region where the DNA region is at least 90% identical to a sequence selected from the group consisting of SEQ ID NO: 391, 385, 386, 387, 388, 389, 390, 392, 393, 394, 395, 396, 397, 398, 399, 400, 401, 402, 403, 404, 405, 406, 407, 408, 409, 410, 411, 412, 413, 414, 415, 416, 417, 418, 419, 420, 421, 422, 423, 424, 425, 426, 427, 428, 429, 430, 431, 432, 433, 434, 435, 436, 437, 438, 439, 440, 441, 442, 443, 444, 445, 446, 447, 448, 449, 450, 451, 452, 453, 454, 455, 456, 457, 458, 459, 460, 461, 462, 463, 464, 465, 466, 467, 468, 469, 470, 471, 472, 473, 474, 475, 476, 477, 478, 479, and 480; or
(4) a methylation sensing binding moiety and polynucleotides to quantify the number of copies of at least a portion of a DNA region where the DNA region is at least 90% identical to a sequence selected from the group consisting of SEQ ID NO: 391, 385, 386, 387, 388, 389, 390, 392, 393, 394, 395, 396, 397, 398, 399, 400, 401, 402, 403, 404, 405, 406, 407, 408, 409, 410, 411, 412, 413, 414, 415, 416, 417, 418, 419, 420, 421, 422, 423, 424, 425, 426, 427, 428, 429, 430, 431, 432, 433, 434, 435, 436, 437, 438, 439, 440, 441, 442, 443, 444, 445, 446, 447, 448, 449, 450, 451, 452, 453, 454, 455, 456, 457, 458, 459, 460, 461, 462, 463, 464, 465, 466, 467, 468, 469, 470, 471, 472, 473, 474, 475, 476, 477, 478, 479, and 480.

21. The kit of claim 20, wherein the pair of polynucleotides are capable of specifically amplifying a biomarker that is at least 90% identical to a sequence selected from the group consisting of SEQ ID NOs: 289, 290, 291, 292, 293, 294, 295, 296, 297, 298, 299, 300, 301, 302, 303, 304, 305, 306, 307, 308, 309, 310, 311, 312, 313, 314, 315, 316, 317, 318, 319, 320, 321, 322, 323, 324, 325, 326, 327, 328, 329, 330, 331, 332, 333, 334, 335, 336, 337, 338, 339, 340, 341, 342, 343, 344, 345, 346, 347, 348, 349, 350, 351, 352, 353, 354, 355, 356, 357, 358, 359, 360, 361, 362, 363, 364, 365, 366, 367, 368, 369, 370, 371, 372, 373, 374, 375, 376, 377, 378, 379, 380, 381, 382, 383, and 384.

22. The kit of claim 20, wherein the kit comprises at least two pairs of polynucleotides, wherein each pair is capable of specifically amplifying at least a portion of a different DNA region.

23. The kit of claim 20, wherein the kit further comprises a detectably labeled polynucleotide probe that specifically detects the amplified biomarker in a real time amplification reaction.

The application's sequence listing, which the Patent Office published only in electronic form, follows.

SEQUENCE LISTING (480 sequences)

SEQ ID NO: 1 - DNA, 60 bp, Homo sapiens
tgggcgacgtgacctaagaaatgactttagaactggctaatcattggttttggagggact

SEQ ID NO: 2 - DNA, 60 bp, Homo sapiens
aatgacaatgtgcccgctttcgaccaacccgtctacactgtgtccctaccagagaactct

SEQ ID NO: 3 - DNA, 60 bp, Homo sapiens
gagaaacacgagaatcccgaggaacccgaggaggtcagggagcaagaccagagagacgag

SEQ ID NO: 4 - DNA, 60 bp, Homo sapiens
gtagcggttgaagtggaactccttctccagctccagtgtctggtagcgcgtgtaggtctg

SEQ ID NO: 5 - DNA, 60 bp, Homo sapiens
gacacggacacaggggacaatacacgggtgggcagaagcacaaacacacatgctgacagg

SEQ ID NO: 6 - DNA, 60 bp, Homo sapiens
gaacaccgcagttaccccggggaaattacttatgacctcctcccgcgcgctgccactgtg

SEQ ID NO: 7 - DNA, 60 bp, Homo sapiens
ctacaggagtggacaaagaaccggagcataggcatgtgagaggggttgaaatgaacaaca

SEQ ID NO: 8 - DNA, 60 bp, Homo sapiens
tataacttctcagagccatttccccctgaaagcagttctctgggaccaccttcttttggc

SEQ ID NO: 9 - DNA, 60 bp, Homo sapiens
gttaaatagtccccagagaggaaccccagcagtgacctgtcccacggaggccaaggaaag

SEQ ID NO: 10 - DNA, 60 bp, Homo sapiens
tcaaattcccacttcactctcttacaagctggcctttcaaggtcacaatgcggagcctaa

SEQ ID NO: 11 - DNA, 60 bp, Homo sapiens
tgggattgtgaaactaactgcgagcaactgaataggcggagggggctttagagacttgtg

SEQ ID NO: 12 - DNA, 60 bp, Homo sapiens
taatctcaggcagacccattgtggaaagagctgggttgtcctctaatgcaaccgtttgtt

SEQ ID NO: 13 - DNA, 60 bp, Homo sapiens
cacacagccacccaatttcttccgcgaatctatctggcactctggagagagggggaaaag

SEQ ID NO: 14 - DNA, 60 bp, Homo sapiens
tccgcttaaaatggcgggatttgtaccaaggttctttcccgcaccaaccttccattattc

SEQ ID NO: 15 - DNA, 60 bp, Homo sapiens
attggaccgtttggggtttctgttagggcaactttcccatttacatcttggaacacagcc

SEQ ID NO: 16 - DNA, 60 bp, Homo sapiens
agatgtgtgtgcgtgtgtgtatgtctctgtcttcagtttctgagagtcagtgttcccaga

SEQ ID NO: 17 - DNA, 60 bp, Homo sapiens
gggaagtgaggcttagtcttgggcatgtgaaatctgagttgctaagtggatctgctctcc

SEQ ID NO: 18 - DNA, 60 bp, Homo sapiens
attactgaactgtggctcttctcctacgtccgccttccctatgtcaattcccatttccct

SEQ ID NO: 19 - DNA, 60 bp, Homo sapiens
cgctgatctcttctgttcttagatattgtgggtctcatccttgagctgggagtggggtga

SEQ ID NO: 20 - DNA, 60 bp, Homo sapiens
tggcgatgcggtataggtgcttccatcattcccaatttcattgtattctagtcacacaca

SEQ ID NO: 21 - DNA, 60 bp, Homo sapiens
gtgagtgactctgaggtcgtctctctcaaaggtcccgagctggaaggatttggagaagcg

SEQ ID NO: 22 - DNA, 60 bp, Homo sapiens
atctctacctcctaatctctttcacatgcggtccactcctttctgtccccattgccaagg

SEQ ID NO: 23 - DNA, 60 bp, Homo sapiens
tcttcaccccaatcctggaaaactcaccgtcaccccatatttgagtgctagtccagccag

SEQ ID NO: 24 - DNA, 60 bp, Homo sapiens
tttacatactgcgtttacatggtcagcggctggcgatgtgtgcaagtggtccagaaccag

SEQ ID NO: 25 - DNA, 60 bp, Homo sapiens
ctaacttctagtcgggactgtgagaagggcgtgagagagtgttggcacctgtaaggtaag

SEQ ID NO: 26 - DNA, 60 bp, Homo sapiens
cctttcctctcctgggaacctggacaccttgctctaatcctggggtgtttacaatgaatt

SEQ ID NO: 27 - DNA, 60 bp, Homo sapiens
aggtctagctgcgtgtactttacagcgatgatctcatattccttagcaaggcaccacggt

SEQ ID NO: 28 - DNA, 60 bp, Homo sapiens
gggtgtctacataaatgccctgtaaatgtgaatgaacagcctgtgggtggtgagagcagt

SEQ ID NO: 29 - DNA, 60 bp, Homo sapiens
cgcaagtcaccctgacagtcacttatacacaacgacacgcaaccactcacccgcaaacag

SEQ ID NO: 30 - DNA, 60 bp, Homo sapiens
gaaatggcaactcaggaaccagtctgaagggggttggggtggatatgatcctgggattgg

SEQ ID NO: 31 - DNA, 60 bp, Homo sapiens
tgaataagtgaactgagtgaactgatacctcccctgctgggacatgtccttacagaaact

SEQ ID NO: 32 - DNA, 60 bp, Homo sapiens
atcgtgaaacagacacgacccagaggcacacacatcctcattctttcccttttctcttcc

SEQ ID NO: 33 - DNA, 60 bp, Homo sapiens
tgtgagctgctttggaccttatctgggaatttccttgggcttacagcctttaccctatcc

SEQ ID NO: 34 - DNA, 60 bp, Homo sapiens
tctgcctctgtctcttcctctccctgactctctgttgctattggtctctgacttgtcact

SEQ ID NO: 35 - DNA, 60 bp, Homo sapiens
gaagtcctagcttcgatctcactctccgctatcttgctgcggccccaacctatttctatt

SEQ ID NO: 36 - DNA, 60 bp, Homo sapiens
ttcaagaccgtcttttccacatcttccagtctccagtactcagactccagcttcggcttt

SEQ ID NO: 37 - DNA, 60 bp, Homo sapiens
ggcaggctgattagagtaagaagaccctctcgcagtttgcgctgaaatcgcttccataaa

SEQ ID NO: 38 - DNA, 60 bp, Homo sapiens
taggacttgtttcctgtcctgctgccacagtgctggataagtgagaggtgagaggtggag

SEQ ID NO: 39 - DNA, 60 bp, Homo sapiens
aggtccctgatgtgttctgtctgtggtcttcagatattgttcctccgttcagaagggagt

SEQ ID NO: 40 - DNA, 60 bp, Homo sapiens
ccccaaagcatccgtttccaagtttccctgagtcgtcagaatgggacttctaacactgat

SEQ ID NO: 41 - DNA, 60 bp, Homo sapiens
agaaggagaggcacagacactcctcatcctcatccaagtagagccactactgagagagac

SEQ ID NO: 42 - DNA, 60 bp, Homo sapiens
agagacagtaactcaacatctggcatacaagctattctgggtgtggcatgggcaagcaat

SEQ ID NO: 43 - DNA, 60 bp, Homo sapiens
gcctcgcgtgcatattcattcgcaccacgttttttctttcccaattctgcacacacaatc

SEQ ID NO: 44 - DNA, 60 bp, Homo sapiens
gcctttgttcctgggaatgctgtctcaatgtctcgatctcactttcgccaaagcaaacat

SEQ ID NO: 45 - DNA, 60 bp, Homo sapiens
gggccaccttctctctcacaatcgcacctagtaaatgcgggcatatttagctctcacatc

SEQ ID NO: 46 - DNA, 60 bp, Homo sapiens
gacccgcctgtgtttccaagacattccaactcccacagtaagtagaagcattgaccagtt

SEQ ID NO: 47 - DNA, 60 bp, Homo sapiens
gaaaataacgcagggaagggagagtggaggcacgagggctgctgtcaacagtggttaggg

SEQ ID NO: 48 - DNA, 60 bp, Homo sapiens
cgagtaatgacaggaagctcaagtggaaatgacacctcctcaccacgatctaaagcgtgg

SEQ ID NO: 49 - DNA, 60 bp, Homo sapiens
tctctcggcagtaatttcacaggcttggcggaggaagtaggatcgttagcataagatggg

SEQ ID NO: 50 - DNA, 60 bp, Homo sapiens
catgaaatagcatcgttgtggagaccgctcttccgaatggaaagtcagagtcgtgcagaa

SEQ ID NO: 51 - DNA, 60 bp, Homo sapiens
gaacatctcggcatagacaggcgcagaatttcgatgctggggtctagttagagtggcaag

SEQ ID NO: 52 - DNA, 60 bp, Homo sapiens
gaatcccagtcgatttaagatcacaggtttcattctcccccacagaatcctgacagccgc

SEQ ID NO: 53 - DNA, 60 bp, Homo sapiens
ttctcaggctctgctttccaaagaaaccaggccatgataagatatggctaacctcagccg

SEQ ID NO: 54 - DNA, 60 bp, Homo sapiens
atgaacacagcctcgcgttcttctcagcctgggaaggaccttctgcctctgtaactcgtc

SEQ ID NO: 55 - DNA, 60 bp, Homo sapiens
agattagccttggatctcgcaatcacctttcatcagccatgtaggtgtggcatcccaaaa

SEQ ID NO: 56 - DNA, 60 bp, Homo sapiens
gatgaaagatttcccacctgactttccgtagcccacctctcccggccctttaagcaccta

SEQ ID NO: 57 - DNA, 60 bp, Homo sapiens
tcaccgtgcaaacctaataacttgacccaagcgcaatcacctgtattcacccagagtaaa

SEQ ID NO: 58 - DNA, 60 bp, Homo sapiens
atccagagcaagcagccttctagccaatcattgcaccttatcactatcctgactttggcg

SEQ ID NO: 59 - DNA, 60 bp, Homo sapiens
agaaactgcgccattgttgtcttacagagaaacaaccttctaacactctcttcgccgcca

SEQ ID NO: 60 - DNA, 60 bp, Homo sapiens
cgaccaagttcttagggtgaagtctcagtaggccagtccaggtgtaatctcactctggtg

SEQ ID NO: 61 - DNA, 60 bp, Homo sapiens
acaggaaaggatttatgggtgagagatcaagtgcggaccagacatgactctagcctggag

SEQ ID NO: 62 - DNA, 60 bp, Homo sapiens
gccatctcagactacctgaaagaaaaactcagccacttggcagagtggaaactgccctta

SEQ ID NO: 63 - DNA, 60 bp, Homo sapiens
aatcttaatgtctgtgtcctcgtctctcaccaccgcgttttgcactttgtcgaaaggtgt

SEQ ID NO: 64 - DNA, 60 bp, Homo sapiens
aacggagatgtccaagttcctttccagctctaactgctccttttatggcctgtgttccag

SEQ ID NO: 65 - DNA, 60 bp, Homo sapiens
agtttcagtagaggtccgggttgtctaccctggagtgagaagagctgaggatggaactaa

SEQ ID NO: 66 - DNA, 60 bp, Homo sapiens
actgggcctaactttgcccaagttgtttcctcgtcctcactctgcttcctaaagctattc

SEQ ID NO: 67 - DNA, 60 bp, Homo sapiens
aatctctgtgagtcctggaaagaagagcgtttgctttgaggggtgattgcctttcatgga

SEQ ID NO: 68 - DNA, 60 bp, Homo sapiens
cctgtgaatatcctgtctccctcactggctcgtattgactggcatcttagtcttccacca

SEQ ID NO: 69 - DNA, 60 bp, Homo sapiens
ctacccggctcagagtttcttctattcagtacaaccaacacccagaggaactggtgagga

SEQ ID NO: 70 - DNA, 60 bp, Homo sapiens
cagtttctctgcaccctacactcattacctagacagttcctggaacatggtcagcataca

SEQ ID NO: 71 - DNA, 60 bp, Homo sapiens
atccccctgtcattccctcccagagcccacactttttatccatagctcttaccacagtta

SEQ ID NO: 72 - DNA, 60 bp, Homo sapiens
tggtggcagtcacctcctttaagatcctgggaaggatttgttctcaggaagccagtgata

SEQ ID NO: 73 - DNA, 50 bp, Homo sapiens
ggcctgctgctgccgtcaagtcacctcggtgtccttccccgcagctcttg

SEQ ID NO: 74 - DNA, 50 bp, Homo sapiens
tggaagtcatctcacagcctgtcacacatccttgtgcctgaatctgcatc

SEQ ID NO: 75 - DNA, 50 bp, Homo sapiens
catctctgcagtgctgtttcttgtgtcttagaatctgctggcccctctct

SEQ ID NO: 76 - DNA, 50 bp, Homo sapiens
gctctggcgccacctctgcggaatcccaagcccgcttcacacagccaaga

SEQ ID NO: 77 - DNA, 50 bp, Homo sapiens
atttgccctctggacctttcagcagctcatgaacctcgctgacctcgggc

SEQ ID NO: 78 - DNA, 50 bp, Homo sapiens
gtggatccagacttttccgcattatgtttctaccctgattaaggggagaa

SEQ ID NO: 79 - DNA, 50 bp, Homo sapiens
agtgagcagtggagaacgtgaggctggtcattaggagcaggtagccctgg

SEQ ID NO: 80 - DNA, 50 bp, Homo sapiens
ccagttccaagctggagaggtgacccagagttgccttctgtcatgtcctg

SEQ ID NO: 81 - DNA, 50 bp, Homo sapiens
tgcaaccacacgcgtacacacacatatacaggattttacaaaccggcccc

SEQ ID NO: 82 - DNA, 50 bp, Homo sapiens
ccagaaggacgcctggaagaaaccaatgcttgcgggttgctgcaactaca

SEQ ID NO: 83 - DNA, 50 bp, Homo sapiens
ccgtccatcgacaacccagtcatttccccaggtgaatgggctgcctccac

SEQ ID NO: 84 - DNA, 50 bp, Homo sapiens
cccaatccagaaatacctgactccacagacagccacgtccatcacggcct

SEQ ID NO: 85 - DNA, 50 bp, Homo sapiens
tggattctggcgtatggctcatcagaggaggcactaacatcagggctgcc

SEQ ID NO: 86 - DNA, 50 bp, Homo sapiens
tcatcaaaagagactggaaagataaatctggtaacaggtgtcccaaagtt

SEQ ID NO: 87 - DNA, 50 bp, Homo sapiens
gccacagcctctgacagcaaagggaccagtaacagcagcaaaacccgggc

SEQ ID NO: 88 - DNA, 50 bp, Homo sapiens
acccactgcccctcactctattcccaccacatcctgaatcctgctccacc

SEQ ID NO: 89 - DNA, 50 bp, Homo sapiens
caagctgtatcacagatttcacacccataaatctattaacaccaccctcc

SEQ ID NO: 90 - DNA, 50 bp, Homo sapiens
aatggcgggaaacagaggaggctcgaggcttgctcacacgcacacagcca

SEQ ID NO: 91 - DNA, 50 bp, Homo sapiens
tgtccaccttcctctggtccttgctgcctggctctggacacccctctgag

SEQ ID NO: 92 - DNA, 50 bp, Homo sapiens
tcatcaaataaatatcaactccctcccccactccccaaatcaaagctcaa

SEQ ID NO: 93 - DNA, 50 bp, Homo sapiens
gctcgacacccgggctcactattagttcccctacatccaccccgcagcct

SEQ ID NO: 94 - DNA, 50 bp, Homo sapiens
ctcatcctcgacctttaccctcatccatttccccctcctaatccttgctc

SEQ ID NO: 95 - DNA, 50 bp, Homo sapiens
aatctcagaggaggcttggacgtggtagagcaacgctagtcctgtgttag

SEQ ID NO: 96 - DNA, 50 bp, Homo sapiens
tttcctgttgtctccctgttgaccttgctgtttccctgtctctgtctctg

SEQ ID NO: 97 - DNA, 23 bp, Artificial Sequence
  ha1c_00037 amplification left primer
gctttctggtcaaagagggaatg

SEQ ID NO: 98 - DNA, 23 bp, Artificial Sequence
  ha1c_00037 amplification right primer
tttacactcgagagacgcacagg

SEQ ID NO: 99 - DNA, 23 bp, Artificial Sequence
  ha1g_01283 amplification left primer
gcaccggcacggccctactcacc

SEQ ID NO: 100 - DNA, 26 bp, Artificial Sequence
  ha1g_01283 amplification right primer
gcgccctcactcaccgcttccttcac

SEQ ID NO: 101 - DNA, 25 bp, Artificial Sequence
  ha1g_01465 amplification left primer
ggccccggcagcccttatcgtatcg

SEQ ID NO: 102 - DNA, 23 bp, Artificial Sequence
  ha1g_01465 amplification right primer
gtggcggagctggcggggttcac

SEQ ID NO: 103 - DNA, 28 bp, Artificial Sequence
  ha1g_02335 amplification left primer
caggcggggagaaaagttggggaacagg

SEQ ID NO: 104 - DNA, 31 bp, Artificial Sequence
  ha1g_02335 amplification right primer
gcggggtggtttctagtctgggtgcctcttg

SEQ ID NO: 105 - DNA, 23 bp, Artificial Sequence
  ha1g_04114 amplification left primer
gatgaacggtacattctggaggg

SEQ ID NO: 106 - DNA, 23 bp, Artificial Sequence
  ha1g_04114 amplification right primer
cagcatgtgtgtttgtgcttctg

SEQ ID NO: 107 - DNA, 34 bp, Artificial Sequence
  ha1g_04194 amplification left primer
gaacaccgcagttaccccggggaaattacttatg

SEQ ID NO: 108 - DNA, 27 bp, Artificial Sequence
  ha1g_04194 amplification right primer
atcgcggccatcggctagcagaacgag

SEQ ID NO: 109 - DNA, 23 bp, Artificial Sequence
  ha1p_05922 amplification left primer
ctatgctccggttctttgtccac

SEQ ID NO: 110 - DNA, 23 bp, Artificial Sequence
  ha1p_05922 amplification right primer
tttctgtaaggcagttgccaagc

SEQ ID NO: 111 - DNA, 31 bp, Artificial Sequence
  ha1p_09663 amplification left primer
tggggtatcccgcgattatgcaagatgagga

SEQ ID NO: 112 - DNA, 26 bp, Artificial Sequence
  ha1p_09663 amplification right primer
gtggcgcaggctgagcgggagttttg

SEQ ID NO: 113 - DNA, 33 bp, Artificial Sequence
  ha1p_100558 amplification left primer
ggacttagacccccatgaacaccccctgataag

SEQ ID NO: 114 - DNA, 25 bp, Artificial Sequence
  ha1p_100558 amplification right primer
cgggagagcgggaggctgggctaag

SEQ ID NO: 115 - DNA, 23 bp, Artificial Sequence
  ha1p_10286 amplification left primer
accgcggagcccacccaatggtc

SEQ ID NO: 116 - DNA, 30 bp, Artificial Sequence
  ha1p_10286 amplification right primer
ggtctcagagcgggcagcccctatgtctag

SEQ ID NO: 117 - DNA, 23 bp, Artificial Sequence
  ha1p_108198 amplification left primer
gaaaggacggtagcagatgttgc

SEQ ID NO: 118 - DNA, 23 bp, Artificial Sequence
  ha1p_108198 amplification right primer
gaaactgggtgggattgtgaaac

SEQ ID NO: 119 - DNA, 23 bp, Artificial Sequence
  ha1p_16916 amplification left primer
gcccaattagagttaccaagccc

SEQ ID NO: 120 - DNA, 23 bp, Artificial Sequence
  ha1p_16916 amplification right primer
ttcattagaggccaatgtcggtc

SEQ ID NO: 121 - DNA, 34 bp, Artificial Sequence
  ha1p_18823 amplification left primer
ccaatttcttccgcgaatctatctggcactctgg

SEQ ID NO: 122 - DNA, 29 bp, Artificial Sequence
  ha1p_18823 amplification right primer
agcggcgaagggtccccgaagttcattac

SEQ ID NO: 123 - DNA, 21 bp, Artificial Sequence
  ha1p_22139 amplification left primer
cctgggtgaccaatgcttctg

SEQ ID NO: 124 - DNA, 23 bp, Artificial Sequence
  ha1p_22139 amplification right primer
aatctaagactgaccggcgtgag

SEQ ID NO: 125 - DNA, 33 bp, Artificial Sequence
  ha1p_26420 amplification left primer
ggaccgtttggggtttctgttagggcaactttc

SEQ ID NO: 126 - DNA, 27 bp, Artificial Sequence
  ha1p_26420 amplification right primer
gccgggatggaattcggcaaggatttg

SEQ ID NO: 127 - DNA, 23 bp, Artificial Sequence
  ha1p_38800 amplification left primer
ggtaactcgaccagcacacactg

SEQ ID NO: 128 - DNA, 23 bp, Artificial Sequence
  ha1p_38800 amplification right primer
tgagcccaggaggtcaaagttac

SEQ ID NO: 129 - DNA, 24 bp, Artificial Sequence
  ha1p_41780 amplification left primer
actcagatttcacatgcccaagac

SEQ ID NO: 130 - DNA, 24 bp, Artificial Sequence
  ha1p_41780 amplification right primer
gcggaggaagtatgctgatgtagt

SEQ ID NO: 131 - DNA, 34 bp, Artificial Sequence
  ha1p_42103 amplification left primer
ctacgtccgccttccctatgtcaattcccatttc

SEQ ID NO: 132 - DNA, 29 bp, Artificial Sequence
  ha1p_42103 amplification right primer
atccggcgctgagaccaactccgagactc

SEQ ID NO: 133 - DNA, 26 bp, Artificial Sequence
  ha1p_47490 amplification left primer
aggccacgggcaggaaacgggtaacg

SEQ ID NO: 134 - DNA, 30 bp, Artificial Sequence
  ha1p_47490 amplification right primer
gtgggaggggccccttgtttcctttcactc

SEQ ID NO: 135 - DNA, 34 bp, Artificial Sequence
  ha1p_47995 amplification left primer
tgtctggttaatctcacccatgtcatctgctttc

SEQ ID NO: 136 - DNA, 35 bp, Artificial Sequence
  ha1p_47995 amplification right primer
ccagtctttgttgagtagtcttttgccccctttac

SEQ ID NO: 137 - DNA, 32 bp, Artificial Sequence
  ha1p_54181 amplification left primer
atggggccccgggatacgttggaaaatctaac

SEQ ID NO: 138 - DNA, 28 bp, Artificial Sequence
  ha1p_54181 amplification right primer
cggcgacccggctcctttgttgctctag

SEQ ID NO: 139 - DNA, 30 bp, Artificial Sequence
  ha1p_57326 amplification left primer
ccaaccccagtcgctcaagcctgaacattc

SEQ ID NO: 140 - DNA, 34 bp, Artificial Sequence
  ha1p_57326 amplification right primer
cagagggtgggccgagattctattttgggttgag

SEQ ID NO: 141 - DNA, 34 bp, Artificial Sequence
  ha1p_60271 amplification left primer
ccccatatttgagtgctagtccagccagggtgtc

SEQ ID NO: 142 - DNA, 30 bp, Artificial Sequence
  ha1p_60271 amplification right primer
gggggagtccaaagtcggaggggtgcttag

SEQ ID NO: 143 - DNA, 23 bp, Artificial Sequence
  ha1p_62820 amplification left primer
taggcctcttcctaggcttcacc

SEQ ID NO: 144 - DNA, 23 bp, Artificial Sequence
  ha1p_62820 amplification right primer
gggcataaatttcacaccctttg

SEQ ID NO: 145 - DNA, 28 bp, Artificial Sequence
  ha1p_64271 amplification left primer
cttacggggaggcatgggatgggaatgg

SEQ ID NO: 146 - DNA, 31 bp, Artificial Sequence
  ha1p_64271 amplification right primer
ctcagggcggctgtccaactcgtatttctgg

SEQ ID NO: 147 - DNA, 23 bp, Artificial Sequence
  ha1p_69412 amplification left primer
ttagagcaaggtgtccaggttcc

SEQ ID NO: 148 - DNA, 23 bp, Artificial Sequence
  ha1p_69412 amplification right primer
taagctcctacagctgaaacgcc

SEQ ID NO: 149 - DNA, 23 bp, Artificial Sequence
  ha1p_70432 amplification left primer
ggccactgtgtctccctagaatg

SEQ ID NO: 150 - DNA, 23 bp, Artificial Sequence
  ha1p_70432 amplification right primer
gtgggaggtgcttaatgcctatg

SEQ ID NO: 151 - DNA, 23 bp, Artificial Sequence
  ha1p_71854 amplification left primer
gagctgtccttgacttggagagg

SEQ ID NO: 152 - DNA, 23 bp, Artificial Sequence
  ha1p_71854 amplification right primer
ggtttctgggatatgtcactcgg

SEQ ID NO: 153 - DNA, 23 bp, Artificial Sequence
  ha1p_81638 amplification left primer
ggtcccgccgtcccacgcaagtc

SEQ ID NO: 154 - DNA, 30 bp, Artificial Sequence
  ha1p_81638 amplification right primer
ccgccaggcagtgacggccaattagtaaac

SEQ ID NO: 155 - DNA, 29 bp, Artificial Sequence
  ha1p_86556 amplification left primer
gagtaggggcttggggaggacgcagtgtc

SEQ ID NO: 156 - DNA, 23 bp, Artificial Sequence
  ha1p_86556 amplification right primer
cgcccagcccccgaaatggcaac

SEQ ID NO: 157 - DNA, 28 bp, Artificial Sequence
  ha1p_91110 amplification left primer
gacgcagccaccaacatcctctggactg

SEQ ID NO: 158 - DNA, 30 bp, Artificial Sequence
  ha1p_91110 amplification right primer
ggactcgccacggggctttgaacataaatg

SEQ ID NO: 159 - DNA, 24 bp, Artificial Sequence
  ha1p_94558 amplification left primer
gcccgcgttgctgagtggaataga

SEQ ID NO: 160 - DNA, 24 bp, Artificial Sequence
  ha1p_94558 amplification right primer
ctgggggagtgtgggaagagatgg

SEQ ID NO: 161 - DNA, 23 bp, Artificial Sequence
  ha1p_96544 amplification left primer
aaagttgtgagctgctttggacc

SEQ ID NO: 162 - DNA, 23 bp, Artificial Sequence
  ha1p_96544 amplification right primer
agccatggagatagggtctaggg

SEQ ID NO: 163 - DNA, 24 bp, Artificial Sequence
  ha1p_97458 amplification left primer
ttagggagcggggtggggcaatgg

SEQ ID NO: 164 - DNA, 24 bp, Artificial Sequence
  ha1p_97458 amplification right primer
ggcaggtggcggtcggggttctct

SEQ ID NO: 165 - DNA, 24 bp, Artificial Sequence
  ha1p_97786 amplification left primer
ctcgccgcccaactttgatttagg

SEQ ID NO: 166 - DNA, 24 bp, Artificial Sequence
  ha1p_97786 amplification right primer
ggggactttgggtgtgaggactga

SEQ ID NO: 167 - DNA, 23 bp, Artificial Sequence
  ha1p_98401 amplification left primer
cttcataggccctgctgtcatcc

SEQ ID NO: 168 - DNA, 24 bp, Artificial Sequence
  ha1p_98401 amplification right primer
gggtctgtttaggtttccgctctt

SEQ ID NO: 169 - DNA, 23 bp, Artificial Sequence
  ha1g_00353 amplification left primer
gagcaactcctaacactgggctc

SEQ ID NO: 170 - DNA, 23 bp, Artificial Sequence
  ha1g_00353 amplification right primer
ttattagcagtcgatgcgagcag

SEQ ID NO: 171 - DNA, 23 bp, Artificial Sequence
  ha1p_00553 amplification left primer
tctcacttatccagcactgtggc

SEQ ID NO: 172 - DNA, 23 bp, Artificial Sequence
  ha1p_00553 amplification right primer
agtcatgggaaccaaggtcagag

SEQ ID NO: 173 - DNA, 23 bp, Artificial Sequence
  ha1p_04444 amplification left primer
ctcctggagggttcccaaatatc

SEQ ID NO: 174 - DNA, 23 bp, Artificial Sequence
  ha1p_04444 amplification right primer
tatgcgttagaaagcaggaaggg

SEQ ID NO: 175 - DNA, 23 bp, Artificial Sequence
  ha1p_07264 amplification left primer
tactccctttccggtctctagcc

SEQ ID NO: 176 - DNA, 23 bp, Artificial Sequence
  ha1p_07264 amplification right primer
agcactcacagcctttggatacc

SEQ ID NO: 177 - DNA, 23 bp, Artificial Sequence
  ha1p_08159 amplification left primer
cctcatccctggacttgtctttg

SEQ ID NO: 178 - DNA, 23 bp, Artificial Sequence
  ha1p_08159 amplification right primer
aagggcagagattacaaggaggg

SEQ ID NO: 179 - DNA, 23 bp, Artificial Sequence
  ha1p_103437 amplification left primer
taggaacccagctgttgaaggag

SEQ ID NO: 180 - DNA, 23 bp, Artificial Sequence
  ha1p_103437 amplification right primer
acaggtccactcaccaaggtctc

SEQ ID NO: 181 - DNA, 23 bp, Artificial Sequence
  ha1p_105187 amplification left primer
cctcccgaggagctggattatag

SEQ ID NO: 182 - DNA, 23 bp, Artificial Sequence
  ha1p_105187 amplification right primer
aagctctccctttgatctcaccc

SEQ ID NO: 183 - DNA, 23 bp, Artificial Sequence
  ha1p_105778 amplification left primer
agacagcattcccaggaacaaag

SEQ ID NO: 184 - DNA, 23 bp, Artificial Sequence
  ha1p_105778 amplification right primer
gcaattgctttaggtgcacacac

SEQ ID NO: 185 - DNA, 23 bp, Artificial Sequence
  ha1p_10757 amplification left primer
cctgtcaggctgtaggtcctctc

SEQ ID NO: 186 - DNA, 23 bp, Artificial Sequence
  ha1p_10757 amplification right primer
accttctctctcacaatcgcacc

SEQ ID NO: 187 - DNA, 23 bp, Artificial Sequence
  ha1p_108911 amplification left primer
caaggtgaggaggtttgtggttc

SEQ ID NO: 188 - DNA, 23 bp, Artificial Sequence
  ha1p_108911 amplification right primer
attgttcacctctgcgacctttc

SEQ ID NO: 189 - DNA, 23 bp, Artificial Sequence
  ha1p_111312 amplification left primer
actggcaccagtaatgggtaagc

SEQ ID NO: 190 - DNA, 23 bp, Artificial Sequence
  ha1p_111312 amplification right primer
agacttgtgccttggtaccttcg

SEQ ID NO: 191 - DNA, 23 bp, Artificial Sequence
  ha1p_12483 amplification left primer
agtggaaatgacacctcctcacc

SEQ ID NO: 192 - DNA, 23 bp, Artificial Sequence
  ha1p_12483 amplification right primer
tatggaattgacctcatcctgcc

SEQ ID NO: 193 - DNA, 23 bp, Artificial Sequence
  ha1p_16097 amplification left primer
ggcggaggaagtaggatcgttag

SEQ ID NO: 194 - DNA, 23 bp, Artificial Sequence
  ha1p_16097 amplification right primer
tcctggcgttatcaaagcaaatc

SEQ ID NO: 195 - DNA, 23 bp, Artificial Sequence
  ha1p_27029 amplification left primer
ttcacgtcttctgctcctgtctg

SEQ ID NO: 196 - DNA, 23 bp, Artificial Sequence
  ha1p_27029 amplification right primer
tccatgaaatagcatcgttgtgg

SEQ ID NO: 197 - DNA, 22 bp, Artificial Sequence
  ha1p_29823 amplification left primer
ctgtcgccagggagggcaactc

SEQ ID NO: 198 - DNA, 21 bp, Artificial Sequence
  ha1p_29823 amplification right primer
ggccgcgggtagcagaggaac

SEQ ID NO: 199 - DNA, 23 bp, Artificial Sequence
  ha1p_40588 amplification left primer
ggtcagattacacccaacttgcc

SEQ ID NO: 200 - DNA, 23 bp, Artificial Sequence
  ha1p_40588 amplification right primer
catctgaaccttcaccgtttgtg

SEQ ID NO: 201 - DNA, 23 bp, Artificial Sequence
  ha1p_45692 amplification left primer
gggaaataattccaggaagcagg

SEQ ID NO: 202 - DNA, 28 bp, Artificial Sequence
  ha1p_45692 amplification right primer
tgagatgacagagtaaagtgaaagcaag

SEQ ID NO: 203 - DNA, 23 bp, Artificial Sequence
  ha1p_47429 amplification left primer
actcaagcaccaccagctaaacc

SEQ ID NO: 204 - DNA, 22 bp, Artificial Sequence
  ha1p_47429 amplification right primer
caggagagagctgctcagatgg

SEQ ID NO: 205 - DNA, 26 bp, Artificial Sequence
  ha1p_49581 amplification left primer
ttccccaccaccactttttgtccagt

SEQ ID NO: 206 - DNA, 25 bp, Artificial Sequence
  ha1p_49581 amplification right primer
cctccccaaccccattcctcttacc

SEQ ID NO: 207 - DNA, 23 bp, Artificial Sequence
  ha1p_55371 amplification left primer
gactcccagataactgcctgacg

SEQ ID NO: 208 - DNA, 23 bp, Artificial Sequence
  ha1p_55371 amplification right primer
tggcttaagatgtcccactcctc

SEQ ID NO: 209 - DNA, 23 bp, Artificial Sequence
  ha1p_58788 amplification left primer
gtttcaggcgcctcctctcttac

SEQ ID NO: 210 - DNA, 23 bp, Artificial Sequence
  ha1p_58788 amplification right primer
gtgaatacaggtgattgcgcttg

SEQ ID NO: 211 - DNA, 23 bp, Artificial Sequence
  ha1p_59216 amplification left primer
aggtgcaatgattggctagaagg

SEQ ID NO: 212 - DNA, 23 bp, Artificial Sequence
  ha1p_59216 amplification right primer
agccttcaatcatagcccaggac

SEQ ID NO: 213 - DNA, 26 bp, Artificial Sequence
  ha1p_61568 amplification left primer
ttgacggctcttgccattatgtctgg

SEQ ID NO: 214 - DNA, 30 bp, Artificial Sequence
  ha1p_61568 amplification right primer
ttccgttacaggtttctttgatgtttcacg

SEQ ID NO: 215 - DNA, 23 bp, Artificial Sequence
  ha1p_61745 amplification left primer
tttcagatcctttcatccttcgg

SEQ ID NO: 216 - DNA, 23 bp, Artificial Sequence
  ha1p_61745 amplification right primer
aatgcaacactctgacaacagcc

SEQ ID NO: 217 - DNA, 23 bp, Artificial Sequence
  ha1p_62060 amplification left primer
tatgagcataggtgggtgaaggg

SEQ ID NO: 218 - DNA, 23 bp, Artificial Sequence
  ha1p_62060 amplification right primer
ttatgggtgagagatcaagtgcg

SEQ ID NO: 219 - DNA, 23 bp, Artificial Sequence
  ha1p_62154 amplification left primer
aggttggtatcctcaaagagccc

SEQ ID NO: 220 - DNA, 23 bp, Artificial Sequence
  ha1p_62154 amplification right primer
cgcagactaaccgagaagagagg

SEQ ID NO: 221 - DNA, 30 bp, Artificial Sequence
  ha1p_62869 amplification left primer
agcggaatcttaatgtctgtgtcctcgtct

SEQ ID NO: 222 - DNA, 25 bp, Artificial Sequence
  ha1p_62869 amplification right primer
ggcgggggagagtcctgagtttgta

SEQ ID NO: 223 - DNA, 23 bp, Artificial Sequence
  ha1p_64529 amplification left primer
tctccctgagagcccagtaaatg

SEQ ID NO: 224 - DNA, 23 bp, Artificial Sequence
  ha1p_64529 amplification right primer
aaataaagcagggaggaagggtg

SEQ ID NO: 225 - DNA, 23 bp, Artificial Sequence
  ha1p_77581 amplification left primer
cctacctcctgagctgtcaccac

SEQ ID NO: 226 - DNA, 23 bp, Artificial Sequence
  ha1p_77581 amplification right primer
ccctccattaaaccaggagaagg

SEQ ID NO: 227 - DNA, 27 bp, Artificial Sequence
  ha1p_78965 amplification left primer
gttgggccggagttttgtttctttttg

SEQ ID NO: 228 - DNA, 28 bp, Artificial Sequence
  ha1p_78965 amplification right primer
atacgtcttccgccccgactactactcc

SEQ ID NO: 229 - DNA, 23 bp, Artificial Sequence
  ha1p_80400 amplification left primer
gagctcctcactggatttcatgg

SEQ ID NO: 230 - DNA, 23 bp, Artificial Sequence
  ha1p_80400 amplification right primer
agagatctgggtggttgtggaac

SEQ ID NO: 231 - DNA, 23 bp, Artificial Sequence
  ha1p_81949 amplification left primer
cttcgagagggactttcctttgc

SEQ ID NO: 232 - DNA, 23 bp, Artificial Sequence
  ha1p_81949 amplification right primer
tatcctgtctccctcactggctc

SEQ ID NO: 233 - DNA, 26 bp, Artificial Sequence
  ha1p_82549 amplification left primer
aaggacctcagtttagaagtgtgagc

SEQ ID NO: 234 - DNA, 23 bp, Artificial Sequence
  ha1p_82549 amplification right primer
atcaagtggtggaggatggagtc

SEQ ID NO: 235 - DNA, 23 bp, Artificial Sequence
  ha1p_84580 amplification left primer
tcatctgttgcgttagatggtgc

SEQ ID NO: 236 - DNA, 23 bp, Artificial Sequence
  ha1p_84580 amplification right primer
ctggaatttgctgccctgtttac

SEQ ID NO: 237 - DNA, 23 bp, Artificial Sequence
  ha1p_86042 amplification left primer
aacagatagacttggccactgcc

SEQ ID NO: 238 - DNA, 23 bp, Artificial Sequence
  ha1p_86042 amplification right primer
agttcctgcagccatttgagaag

SEQ ID NO: 239 - DNA, 23 bp, Artificial Sequence
  ha1p_95305 amplification left primer
gcaacactggtatcgatggtgag

SEQ ID NO: 240 - DNA, 23 bp, Artificial Sequence
  ha1p_95305 amplification right primer
tgcacacatacccataactgcac

SEQ ID NO: 241 - DNA, 20 bp, Artificial Sequence
  CHR01P152508183 amplification left primer
tccctgggtcccttcctctg

SEQ ID NO: 242 - DNA, 20 bp, Artificial Sequence
  CHR01P152508183 amplification right primer
ggagacgtgctggaggtgga

SEQ ID NO: 243 - DNA, 23 bp, Artificial Sequence
  CHR02P046721735 amplification left primer
tgaggtggaagtcatctcacagc

SEQ ID NO: 244 - DNA, 23 bp, Artificial Sequence
  CHR02P046721735 amplification right primer
gccaaagctgttaagtgggaatg

SEQ ID NO: 245 - DNA, 20 bp, Artificial Sequence
  CHR04P001292657 amplification left primer
tcctaacgggcacgaggtga

SEQ ID NO: 246 - DNA, 20 bp, Artificial Sequence
  CHR04P001292657 amplification right primer
gcagagatgagcccgcagaa

SEQ ID NO: 247 - DNA, 20 bp, Artificial Sequence
  CHR05P043085585 amplification left primer
acctctgcggaatcccaagc

SEQ ID NO: 248 - DNA, 20 bp, Artificial Sequence
  CHR05P043085585 amplification right primer
cggcgccaaaacggatattt

SEQ ID NO: 249 - DNA, 20 bp, Artificial Sequence
  CHR08P097127672 amplification left primer
ggcgcagcgaaccagttatg

SEQ ID NO: 250 - DNA, 20 bp, Artificial Sequence
  CHR08P097127672 amplification right primer
cagtccccgcctctcactca

SEQ ID NO: 251 - DNA, 20 bp, Artificial Sequence
  CHR08P102461728 amplification left primer
caccagaggctgaggctcca

SEQ ID NO: 252 - DNA, 20 bp, Artificial Sequence
  CHR08P102461728 amplification right primer
gccaagccccacttttccag

SEQ ID NO: 253 - DNA, 23 bp, Artificial Sequence
  CHR08P143804195 amplification left primer
tggacctcagttcctttggctac

SEQ ID NO: 254 - DNA, 23 bp, Artificial Sequence
  CHR08P143804195 amplification right primer
agggctacctgctcctaatgacc

SEQ ID NO: 255 - DNA, 23 bp, Artificial Sequence
  CHR09P021979668 amplification left primer
tttcgtctcgagtccactaaccc

SEQ ID NO: 256 - DNA, 23 bp, Artificial Sequence
  CHR09P021979668 amplification right primer
ccaatcaatttcaggcaggtctc

SEQ ID NO: 257 - DNA, 20 bp, Artificial Sequence
  CHR09P067743642 amplification left primer
caagtaagggcagcggcaga

SEQ ID NO: 258 - DNA, 20 bp, Artificial Sequence
  CHR09P067743642 amplification right primer
gaggggctgcctggaacaat

SEQ ID NO: 259 - DNA, 20 bp, Artificial Sequence
  CHR11P010436241 amplification left primer
cccagagtgggccttggagt

SEQ ID NO: 260 - DNA, 20 bp, Artificial Sequence
  CHR11P010436241 amplification right primer
gccaaccgtccactcttcca

SEQ ID NO: 261 - DNA, 23 bp, Artificial Sequence
  CHR11P117233022 amplification left primer
acaggaagcctttggagagtgtg

SEQ ID NO: 262 - DNA, 23 bp, Artificial Sequence
  CHR11P117233022 amplification right primer
aaagcagagacagcaggaagagg

SEQ ID NO: 263 - DNA, 23 bp, Artificial Sequence
  CHR12P044081945 amplification left primer
acatgccagactttctaccaccg

SEQ ID NO: 264 - DNA, 24 bp, Artificial Sequence
  CHR12P044081945 amplification right primer
tgatgattgtctttgctttgtccc

SEQ ID NO: 265 - DNA, 23 bp, Artificial Sequence
  CHR13P042532794 amplification left primer
accaatccatacacccttgatgc

SEQ ID NO: 266 - DNA, 23 bp, Artificial Sequence
  CHR13P042532794 amplification right primer
tgtctggcaccatcaaagaattg

SEQ ID NO: 267 - DNA, 23 bp, Artificial Sequence
  CHR14P049549993 amplification left primer
tagttgggaggagaaggtttccc

SEQ ID NO: 268 - DNA, 18 bp, Artificial Sequence
  CHR14P049549993 amplification right primer
ggtagagccgcgccagtg

SEQ ID NO: 269 - DNA, 23 bp, Artificial Sequence
  CHR15P062682028 amplification left primer
acctgtcaatgagacagccacag

SEQ ID NO: 270 - DNA, 23 bp, Artificial Sequence
  CHR15P062682028 amplification right primer
ttcctctccgtactcactgtccc

SEQ ID NO: 271 - DNA, 20 bp, Artificial Sequence
  CHR16P070471895 amplification left primer
gggtagcccctgcctccttt

SEQ ID NO: 272 - DNA, 20 bp, Artificial Sequence
  CHR16P070471895 amplification right primer
ggagggaaagcagggctcag

SEQ ID NO: 273 - DNA, 20 bp, Artificial Sequence
  CHR17P007309455 amplification left primer
ggggtccctcccctctccta

SEQ ID NO: 274 - DNA, 20 bp, Artificial Sequence
  CHR17P007309455 amplification right primer
aatggaggctggggttggaa

SEQ ID NO: 275 - DNA, 23 bp, Artificial Sequence
  CHR19P047620296 amplification left primer
gggatctttctccctctgtctcc

SEQ ID NO: 276 - DNA, 23 bp, Artificial Sequence
  CHR19P047620296 amplification right primer
gaagctgagggtatctgtgaggc

SEQ ID NO: 277 - DNA, 23 bp, Artificial Sequence
  CHR19P054350430 amplification left primer
agacaccctcatctccgactttg

SEQ ID NO: 278 - DNA, 22 bp, Artificial Sequence
  CHR19P054350430 amplification right primer
aggaccagaggaaggtggacag

SEQ ID NO: 279 - DNA, 23 bp, Artificial Sequence
  CHR19P059796623 amplification left primer
cttcctgatgagggtagcagtgg

SEQ ID NO: 280 - DNA, 23 bp, Artificial Sequence
  CHR19P059796623 amplification right primer
aacagcaagatcctctcacgtcc

SEQ ID NO: 281 - DNA, 23 bp, Artificial Sequence
  CHR20P038041321 amplification left primer
acctttccttctcagatccgtcc

SEQ ID NO: 282 - DNA, 23 bp, Artificial Sequence
  CHR20P038041321 amplification right primer
gataatggaccaggacttctgcg

SEQ ID NO: 283 - DNA, 20 bp, Artificial Sequence
  ha1p_108204_l50 amplification left primer
acgggggacacaggagcaag

SEQ ID NO: 284 - DNA, 20 bp, Artificial Sequence
  ha1p_108204_l50 amplification right primer
gtggggaccgtcctgtgctt

SEQ ID NO: 285 - DNA, 20 bp, Artificial Sequence
  ha1p_48631_l50 amplification left primer
cagtggttcctccgccctgt

SEQ ID NO: 286 - DNA, 20 bp, Artificial Sequence
  ha1p_48631_l50 amplification right primer
gcgctggcctctttttgcat

SEQ ID NO: 287 - DNA, 23 bp, Artificial Sequence
  ha1p_94692_l50 amplification left primer
tcctggactttcctgttgtctcc

SEQ ID NO: 288 - DNA, 23 bp, Artificial Sequence
  ha1p_94692_l50 amplification right primer
cgttcatgaagaagttgctgacg

SEQ ID NO: 289 - DNA, 462 bp, Homo sapiens
gctttctggtcaaagagggaatggcccaggcggtgatgtggaggatagaatgaagcactgagtatgagtggcgaaggcgtacggtgggtgtagagattttctgggcgacgtgacctaagaaatgactttagaactggctaatcattggttttggagggactaaaagtagttcctggttggtgaaaataaatcattaatgcgttttaaatgaaaaagaaatgcatgcgtcttgtaaaaaatgtgaaataaaagaggcataaagtcaaaagcagagcctatgccttcccccaccaaacaaacaggtaacctagttaacaggtgtgtcgtaggattcgaagttcgcctccagctccgagagtgcgcctacatctcttccaacaaaatccactcacacttgcaacgcctggcaaggctcttcaatatgtgattccttgactgtcctgtgcgtctctcgagtgtaaa

SEQ ID NO: 290 - DNA, 424 bp, Homo sapiens
gcaccggcacggccctactcaccatccgagtgctggactccaatgacaatgtgcccgctttcgaccaacccgtctacactgtgtccctaccagagaactctcccccaggcactctcgtgatccagctcaacgccaccgacccggacgagggccagaacggtgaggtcgtgtactccttcagcagccacatttcgccccgggcgcgggagcttttcggactctcgccgcgcactggcagactggaggtaagcggcgagttggactatgaagagagcccagtgtaccaagtgtacgtgcaagccaaggacctgggccccaacgccgtgcctgcgcactgcaaggtgctagtgcgagtactggatgctaatgacaacgcgccagagatcagcttcagcaccgtgaaggaagcggtgagtgagggcgc

SEQ ID NO: 291 - DNA, 468 bp, Homo sapiens
ggccccggcagcccttatcgtatcgcgcagagagcaaactgcgcctgggcaaccagtcgggagggtgagtcccgcgcgcgacagaagcttctggcgcgaatggagaaccaagagtttctaagttcatctgcgccgtccgaggtgaccgatgggcaggtctcaacagaaatatccacttgctccgaagtcttccagaagcccattgtgctcaggattctcgacactcacagagagcttgaggagtccgaggatcccgagaaacacgagaatcccgaggaacccgaggaggtcagggagcaagaccagagagacgagtccgaggaatgtgatgagcctcatgagtcctatgagccccacgctccctatgcgccccacaagccccgggactcctatgcaccttacgaactccatgggccccatgcagcccccaaactcctcaaggcccgtgaaccccgccagctccgccac

SEQ ID NO: 292 - DNA, 453 bp, Homo sapiens
caggcggggagaaaagttggggaacaggcgagggcaagggggcaaagccgaaggaggttgcagcgctggcctggtccctgcccaggcatctactcgcccgcctttgcctctgagtcctccccgctgggctgcgtggaattgatgagcttgttttcctttttccacttcatgcggcggttctggaaccagatcttgatctggcgctcggtgaggcagagcgcgttggcgatctcgatgcggcggcgccgtgtcaggtagcggttgaagtggaactccttctccagctccagtgtctggtagcgcgtgtaggtctggcggcctcggcgcccatggctcccatacacagcacctacgagcagaaacggccgggcgccggtaagccagggcctggagggttgacccagtcagcccagtgcctcccacaagaggcacccagactagaaaccaccccgc

SEQ ID NO: 293 - DNA, 556 bp, Homo sapiens
gatgaacggtacattctggaggggtgcggaagagcgcgggctggagtcccccagaccagggctcctggcagccccctccccttaggctccgtccctgaccctcgccgggacacagcctccctggtcctccccagcgctccctggttccccaccgctcttcgcccgcccctcgccccagcccagtccaacccggcccagcctagcccagcgggtggagggcgcacctcgtgctgggcgccggggaagcgctcgcgcacgcgccggaagagctggcggaaggtggcgcgcaccacggcggggcacgcgggaaccgagcggctgagcgcgctcagcagggcccccaggtgggcgcgcagcgtctgcgcgctctgctccagcacctcggcctcggtctgcgggcggtgcagcccggaacacctgcgtggaacggggcgggttggcagaggaggtcacggtcagcgccagggccacgacaggaacagtggctctcacagcagccgggacacggacacaggggacaatacacgggtgggcagaagcacaaacacacatgctg

SEQ ID NO: 294 - DNA, 532 bp, Homo sapiens
gaacaccgcagttaccccggggaaattacttatgacctcctcccgcgcgctgccactgtgcgctccctcccctcccctgctttcccttcctctcctctcgcgcaccctcctcccgccctcagggacccctgggcaaggccactgcgccccgggtctacggcagctggcggggcgctcaacgcgcgcactcacacggacgacgtagcgcaaagagttcctgtcgtccaggctgaccataagcgagaagagcgcggcggcgctgtacacgccctgcacttttttacagcagccagttgaggtcccatcgcgcagcaaccccccggcgctccgccgcgccgcgcaggtcccagcccccgcagtcctcgatgacctccagcatgagcagcgggttcagtcgttcgatctcgcgcatctcgaggcacaagcggaagaaggagcgcacctagtgctgggcagcgccgccgggtccacccttgggccgagccagcaggcgccgcaggcgctcctcgttctgctagccgatggccgcgat

SEQ ID NO: 295 - DNA, 417 bp, Homo sapiens
ctatgctccggttctttgtccactcctgtaggttcctgctttttctgggtgtgtcttcattccccaggtccctgacatctcaccagcgtcttcattcactcagcccaattcgggtcgaagccctgaatccaagagaacttaacacagttttcctgatgcaggcgtcttttgttcatcttcgaattctggcacacagaggggagaggaatgctgattttgcctagtttaaaggggaaatagttatcaatcggttaatgacgttctaggttggaaaaatattagtcattcagacttggcgccctggtcctgctcagcagggctggctcttcatgtcgtttctaagcgccagcgccttggagggtgcagctccagagatccctgaaatcaggcatctgcttggcaactgccttacagaaa

SEQ ID NO: 296 - DNA, 563 bp, Homo sapiens
tggggtatcccgcgattatgcaagatgaggaagaagtagagagctcggggtaagacatatggtcagatcttccatggagggcgagagaggattgggagaacgggtgcaagccttgcgccgtggcgtgagggctgcgcaggcagccaaagagcgggtgttccatagcatgcaagtttcgggttccaggcagaagacttcacggcggttccaaaggccaccaccctctgtcactttttcactggaaaccgtgtgattttttttttaacctcccaaagcaatagcggtgcacttctgcagagctcggataatcccggtcctgagccccagcggccagtctcctttacatatgaacagtcggacctggaagagcttccctgagctactcagatgtcaagagtgggagaggttgaagccaaaagaaggtggtcccagagaactgctttcagggggaaatggctctgagaagttataaatagagtgtaacgtgagctgggggctggcttaggagcccagagttgaccacatgcaaactccctccaaaactcccgctcagcctgcgccac

SEQ ID NO: 297 - DNA, 598 bp, Homo sapiens
ggacttagacccccatgaacaccccctgataagccgccaaggcccgatttgggaagcgggggcgggaatttgttctctaaaaatggccaagggaatcccaggttaaatagtccccagagaggaaccccagcagtgacctgtcccacggaggccaaggaaagtcctccttccctgcatgtgaacgtgaccttgtctgtcaagtaacgagggggatttgtagacaaccctgttcttccccattccctcaactcctcagaaaaattagtgtcagtgccggcccctctctgccctctgcggactcctgccgcgggcttcaggccgccctaaacctggccctgtcgcttccctcaactgaacgcattcagacgccagggtccccacactccattcaagctttcctaacgcagcgccttcctctccgctcagctcccgccaggcttggccccctccgcagcctcctgctcccccctcgcccgcctccctccctctctcattctacgtcatgagatgacgtcggaagccgggcgggaggaggagcccccctccccagtcagcggctcccgctgcagcttgcttagcccagcctcccgctctcccg

SEQ ID NO: 298 - DNA, 489 bp, Homo sapiens
accgcggagcccacccaatggtcaggtagacgaaccccttggagttccaaaggccaaaccgcggcggcccagcccggaggtcctgggcgtttctgaagacgtggccgcgccgcgggggctgaggatttgcgtcccggcctgctctctcgcccttctgggccctcctttcccctctacaacgacccagtctgacgctccccaacatccaaaggactacgcctcggaaggtgctcgaaagaggcagaagttcactcttcggtggaaggaaacccagtccatgggaaaggcagcagagccagaggggggcagcgcagcgcctttgctgcggccctaacagctggcaatgccaacccaagggagagaccctgtggccatttcatccccacccccaaattaggctccgcattgtgaccttgaaaggccagcttgtaagagagtgaagtgggaatttgatagcgcctagacataggggctgcccgctctgagacc

SEQ ID NO: 299 - DNA, 566 bp, Homo sapiens
gaaaggacggtagcagatgttgcagtccagctcgccccgctccggaagagagggtaccctcaccaagagctgcatcgtgcccgccgcggactcgaggacgtcgctaacgcggccagctccgtgaacagaacgagcacactctcctggggccgggtcgggtcctggggccggcgccgcggcctctttcccctttaaataggggaataagtgaggccccacccttcggagcgtcacgccttgatcgggccgctccctgtggcggcacgtgtgggggcggtggaggcttgaggccgggaatgacagcaatgatggagtcggggaggcggcccaggccatgccaggaccggagccctgggggccaaagcacccattcctccctactcccgggggagcggggtggggctttccttcttcccccaacgcaacgccagcgctccttaattctaccatgtacaaagccccgggtctctctctgcgcctgagccctcagtcactggcacaagtctctaaagccccctccgcctattcagttgctcgcagttagtttcacaatcccacccagtttc

SEQ ID NO: 300 - DNA, 485 bp, Homo sapiens
gcccaattagagttaccaagcccaagtttcccaacagagtgaccacatagattactagaaacaggaagaacagaggggactggagatctggctgatgtgttaatcccgccagaatgaattcagtcacgaaagagccatttccaggtgccattcttctttaagggaatctctggaaacaggggaaaaaaacaaacggttgcattagaggacaacccagctctttccacaatgggtctgcctgagattagcctaacctgtacccacagaatctgcctttacagaacaccgccaattaaccctagagagtgaaggccagtgctgccatatacaagcatgactgctggaaataagggataagggagatggatggaccaggacagaatcgtttttttcccgtctcatcatttcttcattcatttgagccctcccctcacaagtaaaattggaggcagaggcctaagcgaccgacattggcctctaatgaa

SEQ ID NO: 301 - DNA, 462 bp, Homo sapiens
ccaatttcttccgcgaatctatctggcactctggagagagggggaaaagcgttttgagaaagccccgtcacccctccccttccttcttgccgtgaaatatacgaattcatttttattacgagccgcaccgtcctcaccatcacgcacgcacagagccacactcccatattcacactttctaactcgtaagctccgacagcgcctgcattttctttgggagccgcttggaggttcattaatatcattagcatttaaccccctccctcttcccatcccctccccgcacatggctgacgtcagaccccgccaggagttgggggaaaagctaagtgggccagggacgccctattcccctccccgcggctgcctgtcagagcgcttctggagatattacaggggacccagcccgcagcgacaggcacaaagtcacggggtaatgaacttcggggacccttcgccgct

SEQ ID NO: 302 - DNA, 566 bp, Homo sapiens
cctgggtgaccaatgcttctggccaggacctccggagctgcccttcgcctccctgcgattggcccgtgccagatttttcctggggccgagcgcagaccaccccggccgccactcaaaggccgggcctggctcccacccagcggttggtgaaccagagctgcgggctctgagagcttcggtcccgggcggcagcccacagcgggcgcggggcctgggtgcgaggggcggggcagagaccgcgagagagagttctcgtgaaattcgggagactcaacgtgggggaaaaacagtatctggggatccaggtgcggaaatgcacctcaagtgcaggaacgcgggtcagggataggcccgacgggccttgggggtggggagaagggtgaataatggaaggttggtgcgggaaagaaccttggtacaaatcccgccattttaagcggaggttcggagagaaaacaaggtcactaacccaggaaaatgtctgcctctttcccataaatcgcctggccctggccacagacctcctggagactctgttctctgctcacgccggtcagtcttagatt

SEQ ID NO: 303 - DNA, 505 bp, Homo sapiens
ggaccgtttggggtttctgttagggcaactttcccatttacatcttggaacacagccttttgaatatagcccttcgggattggcggggagaagggaccgcgatggaaaaagtcatcatccaaagaatgaagagggaggatccaacatttaggatattttattgacttgctaggcgcgtttaccttatcttcgtattaaccccattttcttcattaaccaattgatgctgtgagaagctatgtaacttgacgagcagtgcccagaactgtttttttttttttctggactcggtcttttccactcaaaaccaacaaaaaaccaaaactcgttcttttccacatcaaaagcaaacaaaaaaccccaaccccaaccccaagagccccactctttcaaaagggcttctccggatcactaagtcctagaggtctttggctaggcctgggtccgatctaaataggaaggtaattctagtgttccgcaaatccttgccgaattccatcccggc

SEQ ID NO: 304 - DNA, 415 bp, Homo sapiens
ggtaactcgaccagcacacactgccctatgtaagtcttggtatggtggaagagtacccaaatcttaaatttctgagttaatgtggctaaagatgctgcattatcattcttattagataaggagcagtgaacattttaatagcaagcgattcttctaaagatgtgtgaatcttagatgtgtgtgcgtgtgtgtatgtctctgtcttcagtttctgagagtcagtgttcccagaatgaacagtttgtgtatttccacttcttacctcctaagagaaagaagatagtctgttgttgttgttaatgaaataggtgtttgtttgtttgtttttttaagagactgcagggtctcactgtcgtgcaggctggagtgcagtggcatgatcctggcttactgtaactttgacctcctgggctca

SEQ ID NO: 305 - DNA, 476 bp, Homo sapiens
actcagatttcacatgcccaagactaagcctcacttcccccagcttcagggcctgcttatctacctctttcagggtggttgccttcaaacctatctccttttctcagagccggcttgtacccatagcctggcagtttagccgctgagatctcatatgcatcccctcgcctccgttcacatgtccactttcctaggccagaccttcatcctccctcactcagaaattctggaaacctcctttcgttgtcctctgactccaggctctcccctgtagtctccactgcaatccattgtcatattctttcccttattttaaacattgtcttcctcgtgttcatgttcttcctctactcagaaacttcagcgttcttctacccacatcaaatccaaactctgcctttcttataagccctgcattactgggcccaccctgtccatctaacttctcttcaactacatcagcatacttcctccgc

SEQ ID NO: 306 - DNA, 409 bp, Homo sapiens
ctacgtccgccttccctatgtcaattcccatttcccttgctttctccaatagttaggactgtaaattctaactttgttaatttcgacgccaagctggaatgaagacgctaagtggacgctaaaaagacacgctgtttgtcacacaaggcctccaactgggacggcgtccaccgcgccccgccccgcccgcggcaccgtggcatcttgggacatgtagtctttggaggggcagctgcctccaccaagtctcctcccccaagacgctgcctttcggcctcgggacgccgtgacgttgcgttcctccagtcccttgccacctccctctttcttcccctctggggaagctcagtgctggacttccgaagaccttttacgacattgagtctcggagttggtctcagcgccggat

SEQ ID NO: 307 - DNA, 424 bp, Homo sapiens
aggccacgggcaggaaacgggtaacgctgtgggggtcgggagatgatggaagggccttgagacctactctaccttctcagaggctgcacaacgagaagcaaggcagcatgcagtcaccccactcccagctcaaggatgagacccacaatatctaagaacagaagagatcagcgtgcccacccttggagccatgtgcgcaaagccagaggctgggctgacccaccagagtgtcccaggtccttcagcctccagaggaggagcagcaccaccagcccagctgcactggggaaggccaacccagcccgtgcctggagctgctcccaatgctgtcggcatgggtgtgctctagctgcccaactcagccccacgctgcctaaacactgcaccccggagagagtgaaaggaaacaaggggcccctcccac

SEQ ID NO: 308 - DNA, 441 bp, Homo sapiens
tgtctggttaatctcacccatgtcatctgctttcaggaaatcaaaagaagatctaacatgaaatgtatttactgccaagaaacaaacagtacaaattaactgaacaatcattcttttgacacatattagaaggagtgcttgcttgaagttctgacatccagttatcttcagtaatgtgtgtgactagaatacaatgaaattgggaatgatggaagcacctataccgcatcgccaatatgtgaagatctacccacgatcagacacacatgcagacggaacctttcctgctgttgaggacatgttcctgagttgaggacactctcccgagctgaggtttctaaaacccctggccaatcaacaactctaagcttaacatcttcatttcatcaaccccagcaaacaagcagtaaagggggcaaaagactactcaacaaagactgg

SEQ ID NO: 309 - DNA, 465 bp, Homo sapiens
atggggccccgggatacgttggaaaatctaaccaaagcaggaaaaactggcgggcctggagaacggggcagagatggaacagaagtccccgttgacttcaggcatcccctgtctttcccatcctgagccaggagaaaagtccgcttcctgcagacgacctcagaccaagcaaggtgcccgccgagtctctccttgcaggtccggcccacgatttccactcatctctttcccccgggcgcggggcggcggcaggcggggtcaccagatccccctagcccgggcccctccaggcgccagggacgctgacgctcgcgctcttcctctctcgcctcccctccccacctctccgctccttcgtccagtccctcccccagcctcggcgcaggggggccgggcttggctccgcgaggcccgtgcattccagagagcccagcgagctagagcaacaaaggagccgggtcgccg

SEQ ID NO: 310 - DNA, 475 bp, Homo sapiens
ccaaccccagtcgctcaagcctgaacattcctcaacaacgcccacaccccctcaaatccggatatttgggcttcctaaatctctacctcctaatctctttcacatgcggtccactcctttctgtccccattgccaaggttgggccaccaccacctatctttgggacaacttacagtcttctaaggggggtcctgccttcggtccgccccacctggctcatctcttttcaacagtttctgcggtcctcacctgcccgagacagcagtctacaatgcgaacacagtcatgtccttccccttcagcggttccccactgcccccaatatgaaaaggagttagaaacccctgccttcccactcccaccgagcaccttcgccttctgaactggccaggggctctgttgcttgctcgttgctctcagaccctttgcgcaaggtgctccctcaacccaaaatagaatctcggcccaccctctg

SEQ ID NO: 311 - DNA, 439 bp, Homo sapiens
ccccatatttgagtgctagtccagccagggtgtctccgggctccaactgatgctccaggcgtctttccctcactggggagcaggccgattgcaccaggcttccatatgaacgagcccggctcccttgaagcagtcctgacccccctggcgggggctgtctagacggggaagccatctcttcaccctgccaacagctaaggttgcaactaggggaggtacgaccgagactgcgactgacaggcctgaagtctgggaatgaatattcaggggattcctttccccctctctcttcccctgtgtccccgcctccccagcactacgccatctgccccctcccggtttctcctccctccaagctacttatccacaaatctgtcccttgagtattcagtccctccctaattctcccctaagcacccctccgactttggactccccc

SEQ ID NO: 312 - DNA, 572 bp, Homo sapiens
taggcctcttcctaggcttcacctacccagccatatacagcaagtaaaggcgccctggttctggaccacttgcacacatcgccagccgctgaccatgtaaacgcagtatgtaaacgcccagccatcccgtagctgcagctctgcgttttaggtcaagctccctaaatgtcccattccaggacccttacgtagggattctcctaccccagtactcttcaccatactgaggataattcactgcttgctactgtgggtccctaagattactcctgttaacccccgtcctttccccccagcactacctaccaagtacaagtcgcctccttttgggttgggttatgtagatatcgcagggtatgtgctggagaagtaggtagaagctagattgtgaaggtgcttgatgctaaggaaagtttagagttcaatttccttttttttctttcaaacacttaggagccagttctaactggaccacgctgccaccacctctcttcagtaaagttgttattgttctgatagatgccttgagagatgattttgtgtttgggtcaaagggtgtgaaatttatgccc

SEQ ID NO: 313 - DNA, 494 bp, Homo sapiens
cttacggggaggcatgggatgggaatggggagtgggggcagacagtagaagcatcccctttgctacggttgaatgaagacagtctagtgggagatgtggctggggctaagaggaagagctgcagtttcctgggccaaagagctgagttggacagggagatggcagcttaccaaggcctgctggttctcagctctagagtctgccttatggtccgagcaggatttatttttaagaacagagcaagttacgtggaagcaaggaaggttttgaggacagaggtttgggtctcctaacttctagtcgggactgtgagaagggcgtgagagagtgttggcacctgtaaggtaagagaggagagcggaagagcgcagtacgggagcggcaccagaggggctggagttgggggggagtgctgtggatgagcgggagaacaatgacacaccaactcctgcactggctgtttccagaaatacgagttggacagccgccctgag

SEQ ID NO: 314 - DNA, 416 bp, Homo sapiens
ttagagcaaggtgtccaggttcccaggagaggaaagggccatgatcctcagaaatgaggagactcagaggtgaagcaaggaggcaaggagcaggtgaggggcctgatcaaggggaagaccagagccttgagcccagtgctcccaccccaaggcagaccttagctctacacacctccctgcccaaacttccccaacagcccctcactgtgtaaggaaacctctgcgtccactatatctgacttccctccccgtgtcaggcccgcctgtggtcatctctctgcttccaatgccagaccctgggtcaggagtcaggctggctactgggggtccccaaactgccctgacactcaacccagggcaggacccaagcagctggcactcaccactggtgctggcgtttcagctgtaggagctta

SEQ ID NO: 315 - DNA, 510 bp, Homo sapiens
ggccactgtgtctccctagaatgcaccacttttccttttcacaaacaagtaaaataattcctgtcaccgtggtgccttgctaaggaatatgagatcatcgctgtaaagtacacgcagctagacctttagagaaactactttcagcatagtctgctttctggctcaattcctgcctccaggatcccaacctgtagcaaaaagccccccttaggggctacatattaaacacatttctcaatcattaggttctctgaagtacaaccaggactcccccttgccccaaccagaaaacatattcccaagatctcccctagtggacagagtctaatagtagcctcctcacaagatcattatgagaatgaaatcaaccaggttaagccctcagtaaggtgcctggcacatagtaaatgctcaataatttatgaatagtctaagtattctctcacggatccatccattcattcattcctttgcaacccacttcactcataggcattaagcacctcccac

SEQ ID NO: 316 - DNA, 579 bp, Homo sapiens
gagctgtccttgacttggagagggctctgttgaagtttacatgtcagtgtggttggtgtgcagtagactccagccaactcagagtgagaggaattaacagcaggtgggggttgggggggtactccacagatcgcctcggggtgtctacataaatgccctgtaaatgtgaatgaacagcctgtgggtggtgagagcagttttctaaggacagtccaaagccatcttcagatcttcaaggagatccatgattcgtgaaggattcactcctctggatcagaggttctgctgtagtgacactcttttttttttttctctctctttttttttttttcttctctatttcaaaggcagatcgggagcggtgccgagaaaaatttccttactagatgacatttcatcgcaatgtccgatcgtttggggcaaattaccaagggcaaggatgggaaaagcaagtactcgactctcagcctgtttgataagtataaaggaaaatcagtagacgcgattagatcctcaggtaaggcccagggttgaaggccagttcctcaaactttctccgagtgacatatcccagaaacc

SEQ ID NO: 317 - DNA, 428 bp, Homo sapiens
ggtcccgccgtcccacgcaagtcaccctgacagtcacttatacacaacgacacgcaaccactcacccgcaaacagcctcaccgccacagacgagtcacccacagacgctccgatgccccacacaccgtgacatgcccccacccgctgtcacacccaggcacaacgggggacagtcacacaaagaagtcgcccgacagtcacactctcgcagccacaacgcctcacccaggcgcacgctgtcacacacagccacccccctggacggtgagcctcagacacagatcgtcctgacggccacacagtcacacgcggtcacacccagggacggccacacctcggtcatccacactcgcgcgtcgaggtttaacttctcagcgccgcagcacactaattgggcagtttactaattggccgtcactgcctggcgg

SEQ ID NO: 318 - DNA, 448 bp, Homo sapiens
gagtaggggcttggggaggacgcagtgtcctgggctgggacccaagagaccctgtggcttcgccgctaacccctcccagtccggcccagaataggagaccagctcaggcccgctgaatcgcaatgcccgggggatggtctcagggtctgccgcgtccctctcggtgcccgagtgggtttgccactgtagactttacacacacacgcacacgcacacacacacacacaccctggaatgagctctccttgtgcccctcggaggaaggctccctggaatgagttagttgattaaaaatgtggcttaagggaattcgaagttgtttaggcaaaaggaaacctgactgaatttctccccacctgccccccttgtagctcccccaatcccaggatcatatccaccccaacccccttcagactggttcctgagttgccatttcgggggctgggcg

SEQ ID NO: 319 - DNA, 560 bp, Homo sapiens
gacgcagccaccaacatcctctggactgtctgactcatgcgggtgctgtaggtgaggggctggcagatggccaggagtcggtcataggccatggcggtcagcaggaagcagtccatcccagccagaaggtggaagaagaagagctgggagaggcaggcgtcataggaaattgtggacttgtgggacaagagacgacccaacattgcaggaacagtgacagtgatacatccgacatccagcactgacaggttccccaggaagaagtacatgggggcgtggagtttgggctccaccaagacggctgccaggatgctgaggttgcccccagttgtgaccagataggcaaagaggaggagcacaaagacaactggctgcatctcttctgtttgcactaggcccagtagaatgaactcagcaacagcggtcctattggtcccagcttctggctccatgagtttctgtaaggacatgtcccagcaggggaggtatcagttcactcagttcacttattcaacattaatattttaaaccatttatgttcaaagccccgtggcgagtcc

SEQ ID NO: 320 - DNA, 464 bp, Homo sapiens
gcccgcgttgctgagtggaatagaaaaagggtagtcccagcgtctgactgggcaccagtgggagctcaatactggggaggggaaggataaagattcaagagccgaccagggggccgggttccccaccccgagaccacgcgcccaaggacggcgtgaacctgagtgcagagggacagatctgcacgcctgcgggcgctgtccgcgaatcggcagtgcgggtggcagccccctgacaggggcagatgggtggatcttgcggttttggtaatcccatcgggaagggtccgagtcggaagagaaaagggaaagaatgaggatgtgtgtgcctctgggtcgtgtctgtttcacgatccgtgctgtgtctggagaaaaaggtgtgtctgtccttctgtcccctgactgccgcttgtgtcaaggccccccgctgtgcccccttcggcccatctcttcccacactcccccag

SEQ ID NO: 321 - DNA, 465 bp, Homo sapiens
aaagttgtgagctgctttggaccttatctgggaatttccttgggcttacagcctttaccctatccttgaaatggttctggtttcatagcaacttctaggtggtgtgggcgaagtttgggactggtttagggcggggacaagaccaagaacacaagtttccttgtactacgggagagagggaggggaggaaattggagaccccagcacccccttgctcactctcttgctcacagtccacgatggcccggtccctggtgtgccttggtgtcatcatcttgctgtctgccttctccggacctggtgtcaggggtggtcctatgcccaagctggctgaccggaagctgtgtgcggaccaggagtgcagccgtaagaatggggaggggagaattgggggcttgggcgttagcctgtgtggagggtgctgcattcccttctattccttccctagaccctatctccatggct

SEQ ID NO: 322 - DNA, 540 bp, Homo sapiens
ttagggagcggggtggggcaatggaatgcggggagcttagcctactcttctgagtccctcccggcccccgctagaatggggttactcctctgcccttttgggttcccccctcctctcctctccctggccttgtccccaggatggggatcagcacttccctctccatcaccacttcacacccctgtctccagccggccccatgtgtctcccaccccatctctccatgtccctcaacagtgtctctgcatcgctgtctgccctagagctcttgttctgtctttgggctgtctctgtctctctgtcactgtgtgtctcaggacttggtgtctgggtctgcctctgtctcttcctctccctgactctctgttgctattggtctctgacttgtcactatccagtctctcctgcccactgcacccccctcccagcaccctgtaatgactggagcctgtcttcctcttcctcccacttccctcagccactgcccatcacgagcctctgcaaacactgctctccagagaaccccgaccgccacctgcc

SEQ ID NO: 323 - DNA, 597 bp, Homo sapiens
ctcgccgcccaactttgatttaggaggtcgcctggtcccgccccctgccctacgccgctcccccgcgcagccctgcaaatcaggctctcagctattggctgcctcggtggccaggagggcgaactgggcggagtcttggggggctcgacacgatggggcggggcttggcggggaaagaagcggaggagggagtttcacactgaaaaacccgggatggaggggcgtgaccagattgagggaagcttggggagatcatagtagcgtctggatgggttgcagggaatagaaataggttggggccgcagcaagatagcggagagtgagatcgaagctaggacttccaaagagcgaagattgatagatgccagaggttggtgaaggaagaatggggacccatctgtgccattaattggatgcctttataccctgaaaaggctctctccaaatatacacacaactggactatggtgtatgtgtcaaaggccaggccggacaattcctccttgtgatggaaagccggatgactctatccccttccagtcttggcgtctgaacttcagcagagatgggggctcagtcctcacacccaaagtcccc

SEQ ID NO: 324 - DNA, 484 bp, Homo sapiens
cttcataggccctgctgtcatccctgcactcttagatttagcctttatttcgtgtttgacctcttgctttccccaaataccccttgggctgtctttccccaaatctgctgaagcttgtgatgcacttgctccacggtatagcagcttcacatccatcctttcctgactcgggcctgacttccctttcaagaccgtcttttccacatcttccagtctccagtactcagactccagcttcggctttcgagtgtttctagtcaggagctccactctcttcccaattaccatgagcccgttccaaggtccccaggttttctctcgcagcatcggcacccccttgcagccccgctccagtggcgaccgttcgcggaccccggcctcgcttggggcgccctggccgcgggacttgtggagctccctagtcctcctaggctgcttaccccgccgctccctcccgtccaagagcggaaacctaaacagaccc

SEQ ID NO: 325 - DNA, 418 bp, Homo sapiens
gagcaactcctaacactgggctcggagctaggggcttgctggaggggcgcttgccgcgccggccctcggggctcacagccgggcacgccggactgcggcgagcgcgtgggcgagcgtgtcaggagcgtgcgccctgggtgcgcgcgtgcgagagcgcacgtgtagggtggcttccagtcctcccttcccgcctgagaagcgtccacgcggagttccaggccgggcgctggggaaggaggtcccggggacgctgctgaaaagagagcggccagcccaggcgcggggccaagcctattgccaaaaacatattaccctgcgacattctgtaaatgagataatgatccataaacccggatgatagatgtggcgtgcctgcgatgtcttctctaaatgagctgctcgcatcgactgctaataa

SEQ ID NO: 326 - DNA, 499 bp, Homo sapiens
tctcacttatccagcactgtggcagcaggacaggaaacaagtcctaccacgggagcccccagccttggagggaaacaggcaaggcccaggagctgtgggctccccaggaggacttcctgaagaggggtcttccataccctaagctcagcccccagatcttgacactttgctttctcacactctgtatctgacccatctggaaaatcctgttggtcctgccttcagtatagcctgaattcagccccttctctccactcctcaactgtcaccttgatccagccagtgtcaacactgggctccctgctccccgcctcgcccctggctattctcatcagccaggcagccagggggtcctgttcaaacccaaagcagctcatgtccctccccgctcagcagctgccacactcccactgcactcagggtaaaacccaaggtcttacaagcccctgcgagatcttccccacacctctggccctctctgaccttggttcccatgact

SEQ ID NO: 327 - DNA, 587 bp, Homo sapiens
ctcctggagggttcccaaatatcaaataactgaaagagtttttctttcgaccatctgagtcaagatgtggtttgtcaggaggaggggggatgggaagaaagaaaaccagcccaagttctgcaacttcagcgcccacgaagcagcatctctagctttcttccatctgtccctctgcacagctggctcagcgagactgccgtgtcccgcttgtgggcaagtgacgcgtctggggagagtgatccagaaatgtcaactttgcttctcgtggctgcagatggtaatcaggtcagttgtctaatcaaagctctatcagacgtattattcattccatcacgtgactcccaagcccctcggccgtacagtaggtcacatgctcaccttaaaaagactatttggaatatcaccatctggagtggagattaatgcagaatcctacactctgatttcactcccttctgaacggaggaacaatatctgaagaccacagacagaacacatcagggacctctttgaaatcataaattctatctataaaactgagcatcagacatgcgtatctgtttacccttcctgctttctaacgcata

SEQ ID NO: 328 - DNA, 429 bp, Homo sapiens
tactccctttccggtctctagccctatccgttactccagctgaagcataaagcaaatgtaggggtgagtgaaatcagtgttagaagtcccattctgacgactcagggaaacttggaaacggatgctttggggccactggatgtgtgtccgtaagagtggggagaggtctggagttatttcatttcgggagactggttgagtttgagcgttggtggatacctgaaaagtaaaacgagtctccttcaaattcccagcaacttggaaaacgattttctctaggagtttctgcaaggggctgtccgcacctcaccttgcgggaggagcggaggagagcggcgctgggctgccgagcggcaggattccgcttgcaaagagcttaggctgaccggaaactgcctcgggcaagggtatccaaaggctgtgagtgct

SEQ ID NO: 329 - DNA, 416 bp, Homo sapiens
cctcatccctggacttgtctttgagtgcacggggagggctgtccttgtccctggcagtgggcttctgcttggtccctgtgatgccgcaggagccagtctgcatgcctgttccggttcttcctcttctcgtctgtcaatttctccctttgtttctctctcttattcttcacttttaggatgttgatggtactagatccataaggctttagttccttttctattttcttggaagtttctctctctgaatcatttttatctttcttttcggtagaaaataattcaacggttttatttagcctatcttctatgacagctttcatgttgtaagaaactccataagcaaccatctccaggaagtccttttcatactggccggtgtccttcctgctgccgccctccttgtaatctctgccctt

SEQ ID NO: 330 - DNA, 536 bp, Homo sapiens
taggaacccagctgttgaaggagaaatgtggttagtagagtctcaacccaggcatcacagagccggtgtcatggggtggagtttggagctaagagacagtaactcaacatctggcatacaagctattctgggtgtggcatgggcaagcaattggtgatggccatttaagcagaatcatggctgaggagggctcagggcagctgacactgggttctctgtcctcaggagccctccttatggacctggagaccccagaggagatgcaggctcggagcctgggcaggcccatcaaatcctcgtgagttgtccctggcccccatgacctctatcttccgcctccccaaatgtgatggcagtgaaccctgacctcagaggtccctgcctgttcgctctctccctagaaagcagtacctgcggcaggtcattgcagagtacgaggcactggaccgagaactcccgtgcatccggaagttccccacaccaccagcttcccagcccctctgcctctgcatggagaccttggtgagtggacctgt

SEQ ID NO: 331 - DNA, 490 bp, Homo sapiens
cctcccgaggagctggattataggcacgcaccaccacgcccgactaatttttgtattttttagtagagacgggggtttcgccatgttggccaggctggtctcgaactcctgacctcaggtgatccgccctcttcggcctctcaaagtgctgagattacaggcctgagccaccgcgcccagcctacggccgggaactttttaaggctaaccctgccatccgcgtcaccgccggttccggacgccccgagggaaggcgggtggtggagcgttggaagaaggcagaggattgtgtgtgcagaattgggaaagaaaaaacgtggtgcgaatgaatatgcacgcgaggcctcagtcctgtgaactcgctgatctggagaagcccttgtctgcactgtccgcccgattgccaggggcgtctgtgattgggaaggtgaggaaagcgctgcaggaagagttctctgcaggatgctgggtgagatcaaagggagagctt

SEQ ID NO: 332 - DNA, 500 bp, Homo sapiens
agacagcattcccaggaacaaaggctgggggtggagggtggaggagggagcaggaacagcccctgtctggaagaactgcaagttctgaggcctgaacaagaaatgtgtcctgttcccgtgctcctggctgcagctgggaagcttcttcagaaaggagacctcccggccctcaccgggatctggctttccttcccttcccaccacatctgtttatacaaaggagggccgctgaaggacaaacataaccgtgtttactgcgagtcccatgctgggcctggagctcagatacagatttgccctcaccatggaggctgaagataaatagatgatcccagaaaaggaaagagggaaggccctgggatggtatagagctggttgaggggtttactcatgaaaggcctctcccaaaaagccatgtagtaacgggcagatttacgtttgaatttaaactctggtgccttgtgttaatatatgagagtgtgtgcacctaaagcaattgc

SEQ ID NO: 333 - DNA, 536 bp, Homo sapiens
cctgtcaggctgtaggtcctctcgggagccctctgcctgccctactgctggcctaggcctcgggctgtctggcggccgcgactcagcgctgacctcgggcgcaacccagtcaggcttcgtgtccttcaggggttctaggctaacaggcgaaaggaagggcgttgggaccgaggggcatcctggtttttatgtacgccactgagaggccaccagacacattttctcaaccgcagatcccccttccccacaccctgctccttgcgtgtcagcctgagagcccttgctttgagaagcttggcagaagctgcaaagggtgggcgggcagctaagagaaatcgacccaaggatgtaaatcgaggccattccattataactggatggacacttttcattttttccttctttcagagacaatctgtttcgtgttttcctaagaaaaattggaaccttcgtaatagcatctaatttgacgggggttgtcgatgtgagagctaaatatgcccgcatttactaggtgcgattgtgagagagaaggt

SEQ ID NO: 334 - DNA, 450 bp, Homo sapiens
caaggtgaggaggtttgtggttccaaggaatcttgtctgcgatttatctgtatcaggatggcttcatttctaatatctacaagttttggtccaagagttttatctaaacgttagataatattgaatgtcgtcgttgtttggtccaaaggggccaaaattaggtgggacaattatgttcttcttgtccctaatgaggctctcagggaatctggtcccagtggccaaaggaggttcctacaaatgcctgctctgtgattgccccaaacatttacttacacagaggactaagaccatgagcccctactcctcacacactcaggacccgcctgtgtttccaagacattccaactcccacagtaagtagaagcattgaccagttatgtagaaatgaggaacaactgagagtgacagcaccaaccttctccaggaaaggtcgcagaggtgaacaat

SEQ ID NO: 335 - DNA, 546 bp, Homo sapiens
actggcaccagtaatgggtaagcaggcccccccatcctcccgaaggagggagatttttctcaccgtcatcaggtggcgcagggtatgggggaaaataacgcagggaagggagagtggaggcacgagggctgctgtcaacagtggttagggtggccttggggcctctcgcaggcaggaccacggacgtgggaagaggagcctcaagaatgtctgggtgtggctgggcacggtggctcacacttgtaatctcagcactttgggaggctgaggcgggcagatctgaggtcaggaattcgagacctcttggccaacatggggaaaccccatctctactaaaaatgcaaaatttaaaattaaaccaggcgtggtggtgggtgcctgtagtcccaaatactcaggaagctgaggcaggagaatcacttgaacccgggaggcagaggttgcagtgagctgaagtcacatcattgcactccagcctgggtgatgagagtgagactctgtctcaaaaaaaaaagtctgggtgcgaaggtaccaaggcacaagtct

SEQ ID NO: 336 - DNA, 439 bp, Homo sapiens
agtggaaatgacacctcctcaccacgatctaaagcgtggagttggagctcagcatgatggcagggctacagctgcagtgtcaaaatgccctgcaagatgtggtggggagcatagaggcaaagggcagaaaggacagcagaagcttggggaacagtccatacctgggggtgacagggaaggaagatggagcagtaggggaactgaccgtggagagaactggtgtaacacagcatcacaaggctggggagaccagagtttcacgacagagaagacagtcaaaaagaaggaagactgataaatggccaaggaatgtgctccatagcaagctggagaaagaatctgagcagagagcgtgaggcagaagccaggtagaaattggtaaagaagaaagtgggcagtgaagaagaaatggaggtggcaggatgaggtcaattccata

SEQ ID NO: 337 - DNA, 505 bp, Homo sapiens
ggcggaggaagtaggatcgttagcataagatgggccgcctgcagctgcctggaaccggcgcgatctgaacgccggctgggaggctcctggggggaacttgcggtcgtctgccctccgcactcctccgggaaccgcagccggccctggttcgctgcgcgccggggctgagacccgggagccgcgtcctgcccgaggaaatgtcaccctccccagcgcgagccctttttcccgcctcagaacgtttctgtccgctcttctatttactctctcagcaagcctaatgccccctcctgcattcttcagcctccccctgcgcccagggctgacgtctatcaagggtgaaatgatggaaactatattcatgggcatgatttccattaaatatcaattaacctgagagcctcggccaggcttgcggtgcgtcaagggtaaatgtacatctcatttccacagggcccgctcggctggaaaagaaaggctttgatttgctttgataacgccagga

SEQ ID NO: 338 - DNA, 481 bp, Homo sapiens
ttcacgtcttctgctcctgtctgacgaccattcttcttccccaagcccagaaacctctaaaaatgaatcattttctccacttatgcagagatagacgctcttagatcaaggttagtattttgaaaacctgactgagagccgcctgattaggcgagggtgggtggaaagaccgcataaatgcccgcacccccgccctgcttccctaacacagctccagctctctctggatctccaaatgacccgcgcgataaattctcctcgatagtagccagacagtaccccagattcactttaaaccctaacacacacacacacacacacacacacacacactgtaattaaatatccaaaccggacctttatgtttaattccactttcaacgaaatcctgctctatacacgacctgatggcgccaatgttctgcacgactctgactttccattcggaagagcggtctccacaacgatgctatttcatgga

SEQ ID NO: 339 - DNA, 461 bp, Homo sapiens
ctgtcgccagggagggcaactctctgccacgttaagaaacatttgccataatgagcgggaaaacataatcttaataataaaaggggggagtgaagagaaagagatagagacggaaagaaagattctcagaaaagcaaagaaaagggactggtggggaagcagtagatgcacaagggggatggggaaaacgcaccccttttggaatgggcttattcaaggaaagggaagcagaaaagagggagtcggattccctccctcgaatgactaaggaagggagcaagttgaacgatttgcacagactggattttttaaaatatatggacaatgattttgagcagcccgggccgaacatctcggcatagacaggcgcagaatttcgatgctggggtctagttagagtggcaaggcgccccgggccagcgctcttttcgggtggactcgttcctctgctacccgcggcc

SEQ ID NO: 340 - DNA, 448 bp, Homo sapiens
ggtcagattacacccaacttgcctcgtttcaggtctgacttggcacctgtaggctttcagcctgaccctaacgtgcccccagcgcctggctagaaacctgaccctaaagtgcccccagcgcccggtgggaggctggatgggcccacctgagctcgcgtggggcgcggacggaggcattctcgctgcccggcacccgcacccaaaagaccctcgcaaggggctttctaaagggaaacttcttgtctgctttctttgtgaacattattttcctgatggcgttacagttttctgcgatgaccccgatttaatgcgcagtggagaccctaaggggtcggcgagaggaggggcgcgggggactttaattcccccttttccaatccgacagccactcctgtgcacctccagactggagcgtctgcagttgtcacaaacggtgaaggttcagatg

SEQ ID NO: 341 - DNA, 477 bp, Homo sapiens
gggaaataattccaggaagcaggagtgtcagatgggggcggtttggaggggaacaggggatcagggaatcaagagggagaaactaaacaggaatacattgccaattgagccctcacaatgcagtaactggtttttgcccccgtaagactttctgatttttttttttttttgagatggagtctcactctgtttcccaggctggagtacagtcactgcaacctccgcctccccagttcaagcaattctcttgcctcagcctcccgagtagctgggacgactggtgtgtgccagctaatttttgcgtttttagtagagatggggtttcaccatgttgatcaggctggtctcgaactcctgacctcgtgatccaacagcctcagcctcccaaagtgctgggattacaggcgtgagccacttcgcctggcctactcccttactttcttagtaaacttgctttcactttactctgtcatctca

SEQ ID NO: 342 - DNA, 559 bp, Homo sapiens
actcaagcaccaccagctaaaccacggagcaggaacaaaaagaggggactcaaagagaagccacaagggtggcgggtgcccagcggcgcgggtgccagtcctgtctggcttgcggcagggacgagttacagaggcagaaggtccttcccaggctgagaagaacgcgaggctgtgttcatggccaggacgccagcgactcccactttcgcctggtcaaaaaaatcccccaaacctggtgtcacccagaggtagggagggaggcagcggctagccaggtccctcgcaccgaaagcgcggattcgcaggatcaggtccagggcgccgggcgcagcgttcagggcggctggtccggcggggtcctctcctgcctggccgcccgcccccagtccctgcgcacaactttctcgtccctcgtgcagcccggagagcgcgaagcgggcacacgcgctctatttataggagcgcagcgtccggctgggttggcttatcgcgcaacccgcgggctccgagaaaagggggagaaggcgtctggtgaccccatctgagcagctctctcctg

SEQ ID NO: 343 - DNA, 499 bp, Homo sapiens
ttccccaccaccactttttgtccagtggtccctttccaaacaattgcttgttggaataccgtgtcgaggcaagctgaaccccaaggaaagcaaagacattcacagagacgttacctcattctgtttagatgatgtaagattagccttggatctcgcaatcacctttcatcagccatgtaggtgtggcatcccaaaataaaaattgtcattatcacttactaacaaatgccattcaaaatacagtggttctttaaagctgttgcagatggtttatctcttgagaaggttgagtaaatgacaaatgtttcataaacaattacatgagcactcctttcctctcttttgcgattaaaatagcagtacagcacatttgtatttatactcgattatatataatcaaagagttaagctctttaattatgcagctagcattgatttatcaaaaagagttatgtgtgtttcttctcatgtgccggtaagaggaatggggttggggagg

SEQ ID NO: 344 - DNA, 473 bp, Homo sapiens
gactcccagataactgcctgacgcccgagccggtggtgcggcagccaccattgcgcaagttcgagcgcccggctctggctgctcacatgatggaggatggggaaggtcctctgcaccagaaaggccgcctatggcacagaacccctgccctacttcccccagcgtcagggaaaggaaaggcaaagaaaggaaagacgaaggaaggagacctacctagctgaggctgcgcgccagcgggaaaggtccgactacctctgatctgcgttctggggacggctggaccccaatgcgccccctgcggcaacgcgactcccgcgttgccacagggtaggctgccatccctccctccatcttctgtgtctcctgttccccagagggggtggaagctgaaggtcagaggaaggggaggtgttgggaatccgggttgtgtggtgtcggctccgcccaggggaggagtgggacatcttaagcca

SEQ ID NO: 345 - DNA, 490 bp, Homo sapiens
gtttcaggcgcctcctctcttacaaccctctcctggggaagtaaaccccatcaagacaccaccacatccttccccagcgactcagcctggggtcacaaaggcctttacgtcccactgaaaaacggttttctttcatttgtgcccattcgttcttgcagccccttccccagatcgaagactagggtcttagtaaggagaggtaaggagggaggggaagaacctgcctggccccccgcggagctctgcagggggcgtcgcggctgcacgccagcgcccgcaccaccccaggcgggaagggagttatcacacagggggtcgcacgcagatctcggggaccgtgggtgccacgaggtcaaactggcagagggagacgctgcagctgctgtaacagcaaggaaagccgaagcccccttaggggatactttacaaaattattttaatcaccgtgcaaacctaataacttgacccaagcgcaatcacctgtattcac

SEQ ID NO: 346 - DNA, 518 bp, Homo sapiens
aggtgcaatgattggctagaaggctgcttgctctggatttttgaattcagaacccaccgtgcattccgggagcgggaatttggggctgaatttgaagagcagtccgctgctcaggtgcacgctgcaagaaacccaacgtgctttttgagaaagctccaaggacttaagctttttagtaatgaacttatgtcagagtgcaagtatagaaatctgctaagtgcatagtgcatccaagaatgcttacactacgggggccccgtcttttgatgcgcggcacttgaaacgtctgctgtactaggttcctgcgcttcttattgcagcgcgctttgcagaagcccgttctgcaggctcctaaagcgcgcgtattccccgggtttgtgctgtggacctgggagagttcccgccttccccactaccccttcttcctcctccccctccctttttctagaactatcttcctgaattcttgctccatagtgatgtatcacattaaaagtcctgggctatgattgaaggct

SEQ ID NO: 347 - DNA, 461 bp, Homo sapiens
ttgacggctcttgccattatgtctggacgttttaatttcaacaaaacgaaataatagtgttaagttctttgagtcaaacccgatattacagaggtagggattccaggatattagaattttactataacacaaatgaaacacaaagttccttatgcttaacagtgtatcttagaaaaccttgtttgagtgaattagccttgtactctataatgaaacgaggaatcattgagagatacttaggcaacggattttaaatgagtgaataaggaagggaaaaacttcaggaaaatgcagaaaaaagcagcggagattttggaaaaaaaattctaaagcactttctaacgcaaacacattcgattttttatagctaaacaggataacagatcagtctattaagttaaatgatcaatgtctttgcaggtcatggtctacgtgaaacatcaaagaaacctgtaacggaa

SEQ ID NO: 348 - DNA, 568 bp, Homo sapiens
tttcagatcctttcatccttcgggagggagcccgggaaagagagtgaaggggaagaggagatgcggttgcagttttccacagaaccaagagaataaacgatttgaaaaaataaactcaggcccacctccgtctcacctcccactccccacccaagaatcaaggggaaagatcatctttaccaggtttgagacctgatccatttcagctgagctgcatagcgagtccagaagaggatctttccttgaagggtgcacgcttcctgcaagatgcatctgtaggtgtttgagatcatgtcctgtagttcattccttgtgcaggagggtgagcccgctgaggatggggaaaatttctcgtctgtgttatggtgcccagtaacagtgatttattattcagatctgctccttatttttcatcttgcttcccgctctgaacccaccagagtgagattacacctggactggcctactgagacttcaccctaagaacttggtcgaatgtgccagttgctgtggtcttaacaatccagatgggatgctatttctaaggctgttgtcagagtgttgcatt

SEQ ID NO: 349 - DNA, 519 bp, Homo sapiens
tatgagcataggtgggtgaaggggacccgggttcacctttcagcgcctctttcatcgcgacgcgttcctctttgctgaactgagaagggattcgcgacgccctttgatgctccccgctcctcgggcccatcgatctggagacggtagggaaaactaggagcagcatagccaccagggccagcacgcaaacgcaccgctgagccatgcttctctcgagctcctgctgtcaggctaccggggtagttctgacctaaacgcccagactagcgtttcttggccctagctctgctcttattccggcaaacagccttagccacaccccatatccagatctgaccaatcatcgcttcgctaggacagcggaacaaccaattgacagaatgaccccgcccaggatccttaaggcctttcgagggttgtgggttttcgtgctgaggccagcagttcctgcagagcagaggtgaggtcgggctccaggctagagtcatgtctggtccgcacttgatctctcacccataa

SEQ ID NO: 350 - DNA, 545 bp, Homo sapiens
aggttggtatcctcaaagagccccaccaagtaggcctcgcaggcctcctgcagggccatcaccgcggaactctgaaagcgcagatctgtcttgaagtcctgagcgatttctcgcaccaggcgttggaaaggcaacttgcggatcagcagctcagtcgacttctgatagcggcgaatctcgcgcagagccacggtgccgggacggtagcgatgaggtttcttcacgccgccggtggccggcgcgcttttccgagccgccttagtggccagctgcttgcgcggcgctttgccaccggtggacttgcgtgcagtctgcttggtgcgggccatctcagactacctgaaagaaaaactcagccacttggcagagtggaaactgcccttatatatactcagaaacattctaattggccttgttgattttcaaaagacccgcgcaacaaaaccattggctgaagagtccaacgatgtgattggtgaattactggaaaatctgattggatgaatcacttcatttttgaatcctctcttctcggttagtctgcg

SEQ ID NO: 351 - DNA, 434 bp, Homo sapiens
agcggaatcttaatgtctgtgtcctcgtctctcaccaccgcgttttgcactttgtcgaaaggtgtcagatggtgagatggcttctagactgggctctgcccactaattagctgtgtggccttgggagaatcatccggcctctcttgctgcccttctttccgatgaaataatgctgacgatgatatttcagggttgtccaggggtcaatgaggcgggatagagggaagcatcgtgaaatctgggagccccaggccagcgaaaaatgtggaagggccgtacccgcactctcctagcactgggtgtgaggcagcgtcgtttccccttcgcgctcttcgaatgtcaagtgcaccagcttccaatccctcctctgggcgggcccggtctggctaatctcagctgcagattccagtacaaactcaggactctcccccgcc

SEQ ID NO: 352 - DNA, 561 bp, Homo sapiens
tctccctgagagcccagtaaatgttctgaaattgacatgtgatgtggaagtaattagcaaaataagtcattctccagggttccatagcactcacttattaagtgcttaatattaataagtgcttattaggtgcttaatattaataagtgctttttaagcacttaatattaagtacccgaaaagcacttattaagtgctttcataatcattatcttaaacaaggaattaggagacgtcagtgctagtccagttccaattctcggtgattactttgagaaagtcactctctctgttgggatctttcattcttttgaaaacggagatgtccaagttcctttccagctctaactgctccttttatggcctgtgttccagatggactgccatggtggcataagtggcaccatttacgagtacggagccctcaccattgatggggaggagtacatccccttcaagcagtatgctggcaaatacgtcctctttgtcaacgtggccagctactgaggcctgacgggccagtacattggtaagagcccacccttcctccctgctttattt

SEQ ID NO: 353 - DNA, 440 bp, Homo sapiens
cctacctcctgagctgtcaccacagggcgcacgggactccgctgccccaggttccgggacagtgactacatttcccaacagcccctgcgccacatggtggtcagtcagcctgcaagtcccagcatgcccgagtcaatcgtggggtggggagtctctccatccgtgttaaccccttaggccctggggtacactgggcttcctataccagaaaggttttctaatgattgccctcactcccatccccagccctctaggtcatggggccagagcttcccacccagaaggaagatggtcacattttatcttaggggaagaatataatgcatttttattttctccttagttccatcctcagctcttctcactccagggtagacaacccggacctctactgaaactcttcccctaaaataactaccttctcctggtttaatggaggg

SEQ ID NO: 354 - DNA, 503 bp, Homo sapiens
gttgggccggagttttgtttctttttgtttgtttatttttaatgcagtttggggcagaagctttggagagaaaaatcaacaacagaaagaatagctttaggaagcagagtgaggacgaggaaacaacttgggcaaagttaggcccagtggctctgggacccgtaaaaatgtgagcgccaaaagttccacggtgagggcctccagagagtgagagacaaaatgtatgtggaatttagcttaggactgggaagtattaaagagaaaaattcggccaaagaaactttctgtataggcaaacccagcccaaagatgagcttcatgggcaaggaaaacagtgaaaagcagctgatctgggtgtccgggatccaggggccgcgcctgggagaggggaatgtgtaagaaaaaaccccacaggcaaatgctgggggaggggattgggtaaaacctgtggtgcagttttttagcttcgcagtctggagtagtagtcggggcggaagacgtat

SEQ ID NO: 355 - DNA, 599 bp, Homo sapiens
gagctcctcactggatttcatggtaagaattcaatcaccaggaaaagtttggaagcctctggatcaacgatatccaaagtctctgatctcagcttggaggtgctttgagcctctggccccggtgctctgcactgtcccagagaaaggggtgggccacttttggtcctaacaagcagttcaccaagaacagggcaacggctaaaagatgaagggtgtccagacgccgatgagggatcccaggccctggagaaagacggttacaggataccaagattcctggtggttttccagggcattccagtattagagccctcaccctccttcccgaggttctgcgctgatccagtgcagaagctgcatgcactggagaaatggctaactctgtgcccagggctggacggagcagcatcgcagatcaaaaggccgccacccccaagaagtccatgaaaggcaatcacccctcaaagcaaacgctcttctttccaggactcacagagattatcaagtcccagctcttgcaccccccaacatgccctttcccttcctgcctcattactctgttgaagttccattcctgttccacaaccacccagatctct

SEQ ID NO: 356 - DNA, 520 bp, Homo sapiens
cttcgagagggactttcctttgcaaggaaaacactaggcggaggtaaaaacttggagggaaatacgaagtctgcacacccgtcctgtgttccctcagtgccagggagaggaaactgaagacttcagagggtctccggagggcgcgtttctctcgaagtgcctgtgggagtgggtggagggcttggggagagaggaccatctgggactcgacaaaaggaataacgatggtggggagccaatcctgcttgtgaaatcgagttctctttctgcttgctaaattaggggatggtaaagtaggtgaaaggcctgcaaggggaaaatgcctggggagggagagagaaactcctttggtggggtggcttgtttacagatagggttggtttctaatttcactattggcaggatactgaaaacgagctgctgtaactgaaggaatggaggttagactatgggaagaactgactagtttggtggaagactaagatgccagtcaatacgagccagtgagggagacaggata

SEQ ID NO: 357 - DNA, 446 bp, Homo sapiens
aaggacctcagtttagaagtgtgagcatttcgttaatcaggtaaaacttaaccacaatgtggcacatttagtgatagcctcaccagatcctgtgctgtgtgtgagtgaagcgtcaggagtgagcaggtatacgtgactataagtattcattttggctgtccaaaccattcttggagactttttctttcttttcttttcttttttttttcctgcaagacctttttgtgttatgttaactttttgctaacttgtgttaacttttcctgtgaccttccatatttccccatttagttccccatcaccatcatcctaaagaaaaaggacttccctggatgccttctcaccagttatcccctctccagccctgggtctaagccactagggatttcaccttgctctcccatcagaaaaaggactttctgtgactccatcctccaccacttgat

SEQ ID NO: 358 - DNA, 436 bp, Homo sapiens
tcatctgttgcgttagatggtgcttagaagaaaatgaaagcacattaaagagaatggagaggggttgctattttttatgagtgtacaggcaagaccagcagacaaggtgacatttgaacagagacctcaaggaagaggcggttgggagcccagaggatatttggcgaagtctgtgcctgacagagggaatgactaatgcaaaggcctgaggaaggtgcttgtttcggaaaatcaaggctcaaatagaagccagcgtgttgagggcaatgagaaggagggagagtgatcagagatggtgtcaggagtattgaggaaccaggtggtctccctgctgctgttgaaacttcaagacactgacagcctcgtctccccatgtggttctgagccctctattaatgtggccccctaaggacgtaaacagggcagcaaattccag

SEQ ID NO: 359 - DNA, 420 bp, Homo sapiens
aacagatagacttggccactgccatcacagagagttcgtggatggaggcgagatacccgcacaccttgcgacagccttaactgtaactgtggtaagagctatggataaaaagtgtgggctctgggagggaatgacagggggatctcacttgttctgaggcctgcagggcttccctgaggaattggtgctgaaactgagatatgaaggacaaatgggagtcagccaggcaaagtgggtggggagaagagaaccccttccatccttgtactccctacttgccccctttccccatcaacttgtggggtggcccatgtgggtgcacaccccagcactccctgccacaaagttctacctgggcctcacccccaaaacctcctggctcagcccctccagcccccttctcaaatggctgcaggaact

SEQ ID NO: 360 - DNA, 482 bp, Homo sapiens
gcaacactggtatcgatggtgaggtggagggctgtggtggtggcagtcacctcctttaagatcctgggaaggatttgttctcaggaagccagtgataatttaccggagttttaatacctggcaagttcccaggcttctgcgggtagaatttattttggcacaatatggcctcttgggaggaaatagagacagactcggagaggcccggctgtgcctaggaaaaggcctctgtcacctgtgtgacccctggacagaacctagccaggctcttgaatggaattcctctgcctgtttcagccccatgcactgcccttcagcacacatgcagtaatgcacggacatgcctgacacgtgcagatagggtcacatgtgcagatatgggcacacgtgccattgtgggcacacatgcagatgtgggcacatgtacagttgtggccacacatgcaaatatgattacatgtgcagttatgggtatgtgtgca

SEQ ID NO: 361 - DNA, 512 bp, Homo sapiens
tccctgggtcccttcctctgggagtaaggggtaggctggagggcagggccagattgcggcagcagggacctggaggtccattctgggcccggacctcttccaggcccccgccccccttcggagatccagagcgcagccgcgttctctgaccctcccggctccattcccggggggttacattcgactccatctgcaaacactgcagtggaaactaatggtcagtcgattgcgatttgcatctcattgaaatatcttccaaagcagccagagccttcaggcctgctgctgccgtcaagtcacctcggtgtccttccccgcagctcttgtcctcactggccgggcttcaccacctctgtcttctaggtctgcacctgtggttgccaggtaggtggatgtgagagaccctacccttctggttctctagaagccatcccatcgccgctagcatcatgctgtcccctcagagagctttactctgcaacctcaaccacatccacctccagcacgtctcc

SEQ ID NO: 362 - DNA, 496 bp, Homo sapiens
tgaggtggaagtcatctcacagcctgtcacacatccttgtgcctgaatctgcatcctgagttcttgtgtcccctccctgcactcccacttctaaatagctcattagtgctgggacatgaaggcagctgcagggcagggcagggttaaaaggcagggattgagcaagtccctctgcaggaaagcgtgtgcccatgtaatgtgtctagcagatgtaacttctcgtctgtctgggatggagattatgagcccacatgggcctgtgacttgagcaaaacaacaaaacaaaccaagaaatgtgaaacgcacatgcctgtccttatacgagggctcagacacttctaccctgctgaagcaggtggatgctctaagtggcacccactccgcctgtgctggggacagcagaaggggccctccaagccagactcggctctcgtgaacccttcacgactggggcctccccgctaaaacagcctcattcccacttaacagctttggc

SEQ ID NO: 363 - DNA, 442 bp, Homo sapiens
tcctaacgggcacgaggtgatgcctcacgtctgcacttgtgtctcctgagcagtggttggtcgtgtggagcatcttgtcatgtgccgcttggccattggtttatcttctctgtacaagtgtctaagtccttcacccattttaaaattggatatttcctttggttgtggagttgtaggcgtttttaaaagtgcattctggatagtagctccatatgcagatccctgggttgcagctattttttcccattttttactctgttggtttttcctgctctgcagtttttaagtttgatgtagtcccatttgtctctttctgttgcctgtgctattaggaatctatttttaatgctttgccccttttcactgttcttcctatgatacggtctgtgaggttgcctgtcctcatttgggcgagctgtatcttctgcgggctcatctctgc

SEQ ID NO: 364 - DNA, 538 bp, Homo sapiens
acctctgcggaatcccaagcccgcttcacacagccaagaaaatgttgctccatccctcaagcctcagaccaacgtttgcgctgatcaaggagggagagtctctgcactaccatcagcctgagtatttatgctctgcagagcccgtgggcggaggccagtcagatattaagaaactcagtagtaacaaatgcacgaaaattagtagacaaatgaaaaacgataacattttagagagtacatagaaccaaaacgaaccgtaattccgacagaaaaacatggcgagaaaagaaaccgaaatgaaatgacactaagcaaatcttgaagagaactagcgctacagaacgcaggtattcaagagcgcgcaagggccaagaaccacccgtttccgggaaatgagcgttgctgccaccggaaaactgtctgctagggctctgccctaaccaccttgcaaacgagaaactggcgcgttgaacttagcaagcgccggcacctagcggatagcgctggtattgccaaacaaatatccgttttggcgccg

SEQ ID NO: 365 - DNA, 487 bp, Homo sapiens
ggcgcagcgaaccagttatggtgcccacttgggggaggggcagagattcttgccacttcattcccgggcaaagaaaatccgcgcccaaccgccggccagcctaggcctctgggacttcttctcttgaggaagggcctcttgagcagtcttctctgagcttccttagcctccttccgcaattgtagtagagaaagtgcacgattaacagaggactttgagggacagaaacaactgtagcaaggcgtgcgtcgtggggagggttggcgagctgcacgggcagcacggaggccagggactcagttgcactactacgaagaagccacatgtctttgcaaaggtgactttagtagccctaaaatcatcataaaatacctggcgttaatttgccctctggacctttcagcagctcatgaacctcgctgacctcgggctgcagcggcgagaccctcgagcaaggaacgcgactatgagtgagaggcggggactg

SEQ ID NO: 366 - DNA, 521 bp, Homo sapiens
caccagaggctgaggctccaggaaaagcggagcaagttcattggatcaaacatgtcacaagagtcggacaagtaagtggatcacacgcgccggctgctgctactactaccactttgggctgatggcaactggtttgttatgtttttgtttttaagttgctattgttggtatttttctttcttttttctttttctttttggtggatccagacttttccgcattatgtttctaccctgattaaggggagaaaccctacaacaatgtgaatatttaatatcccctttgggccttgatagtaaaagtgggttttccttttccttcttcccttaggaatggtctcagctcccgctcctggatgaatacttggatattgccagaggttttggtagatgggcgcgggaggcctgctcttccctctctgttttagctgctcccaccgatctggcgtttagggccatttggaagttcagctgagttccttcgatttgtccaaagggcctactggaaaagtggggcttggc

SEQ ID NO: 367 - DNA, 467 bp, Homo sapiens
tggacctcagttcctttggctactaaggaggcccaacgatcctcgcctgtgtgggacggggctacctgcagacatagagggcctttgagcacctcgtagcttgcttcccagccagcctgggtgtggaaatggccgtgctgacaggctctctgcgatagggcccagccatggccagtgggcctcccacaatctgcccctgggtgcagggccttgagcagggaggccatcgtgctgcctaagagaccaggacccagcaggggccatacccagattcagaggctcaggaccaccacggaactgaaaggaggttcaaggcctcaaacaagagtggcccctaaaacagttggtaaaggagtgttttcacctctgtttacagttgagtgcactgctcaaggtcatgcagctggtgaacggcagggagtgagcagtggagaacgtgaggctggtcattaggagcaggtagccct

SEQ ID NO: 368 - DNA, 410 bp, Homo sapiens
tttcgtctcgagtccactaaccccactcagactctgtctgctcccacccccaccgcggccagtgaaatcccaatcgtcttccacgtggaaccccaggtccgcagttatgataacggatcacatcgctcctgcggaaagtgcgcgcggtggagtgataattggacctagcgtctaaattcttgttggaggacctcgttccagctgccagttaagcctctgggatccgcagcgtctctaggaattgagagagtggggaagttaggatccaggaggaggatggtgggggctgaggagtggaggagcagcgtgcatctcatctcttgtcgccgggcgggcgctctttcgggtccagggcccttgcacccccagcgtggctccggaggcggcgagacctgcctgaaattgattgg

SEQ ID NO: 369 - DNA, 501 bp, Homo sapiens
caagtaagggcagcggcagatctctggatttggggcgcagtttggggaacgtggatgcaaccacacgcgtacacacacatatacaggattttacaaaccggcccctatcccactgcctccctccacacttcacacaccaagtgcatcctgcccacctcaccgtttccatcatcacattctttctccaggagagtcagccgagagatgagggggtcctagcggggattcctggaaatgtcaccccccaacacctccgtccgccaccccatcccctctgctgtaccttttacacacacactctcacacactcactcctgccatgactgtcatcaggcccgcctgctgcgcccgaagcccggcatctcagcgggcaccggaccccaggcgtctcgctcgcaacgccgccttcccccgcctcgctagctgatggttccaggcactgcctcctggatgtcgcctgctgcctccgctcctccgcactattgttccaggcagcccctc

SEQ ID NO: 370 - DNA, 428 bp, Homo sapiens
cccagagtgggccttggagtgggagagcgggctggcacggtgggaccctggggtgggaccacagagaaaagccaggccgcggaggccgagaagctgtaggtacccaggtatgtgaaaaatctggaggtgggggccgcgggtgccaactctggaaactgcactccaagcgtttcaggaaggaagacgtggtcagcaggctcagatgccaggaagaggtgagcgagggaggctgcacggcacccagtggctttggcaactaggaggtcattcaggactttgaggggcaggtgaaggcagagcgaggagggttggagagggagcgtgtgcacgtggtgtgtgtgtgtgtgtgtgtgtgtgtgtgtgtgtgtgtgtgtgtgtgtaggtgatccaagtgaccagaaggacgcctggaagagtggacggttggc

SEQ ID NO: 371 - DNA, 519 bp, Homo sapiens
acaggaagcctttggagagtgtgacttgaacttggcgggctctcaccccaaatccagcctaggaaggctgaccagaggggcctgctccttccccagccagatggacgccgtctgcctcccgcccaagttcagacggtctagcaagatgcattgaactcagggcgggtgtgtgccaggaggccgaggaggaacgctcagctctccagcttctatctgctgcctttctgccactcaagctatctttctttggggttaaagcagggtcctcctttaagttgcaaattttcttagagaggaggccgacaggaagaggggctgggtactctggaaggctgaggtggcaggagagggaagagtagggtccagctgaccccacaaaggcaggccaatcagagccacccagcattgcacacgcccgggcacgcacaccagcacactcaccaccgtccatcgacaacccagtcatttccccaggtgaatgggctgcctccactcccctcttcctgctgtctctgcttt

SEQ ID NO: 372 - DNA, 581 bp, Homo sapiens
acatgccagactttctaccaccgctggtatcacttatgtgagatttacatcactttacacacacaccttgttaagtgtgagttcagtttttaatagtacaagtgcagttattggtgagtctcatgctactgtgtttgttgtgctttcagatcctattgatcatcgcttcagttattgggatcattgtctataggctctcggtgttcattgtattttctgcaaaacttcccaagaacattaatggaacagacccaatccagaaatacctgactccacagacagccacgtccatcacggcctccatcatcagctttataattatcatgattctgaacaccatatatgaaaaagtggcaattatgattactaacttcggtaaggtcctactatagcttaggtaacttctgacatatttttagaacctgccaaaaatagagactgttatcttttaggcgtttcaattccagtaggttacaatttttagaaattttcaagtgtaaacatattttctctagcatgtatggaaataaattatctacagctttgcattagtaaaagggacaaagcaaagacaatcatca

SEQ ID NO: 373 - DNA, 570 bp, Homo sapiens
accaatccatacacccttgatgcctggaggtaagattgacaatggagggggggaggtgaagatcaaggttgaggtgaagctcacagatggcctgcaagatgcctattttactcatcatttattttttaaaaagctgaacatttatcggctgaatctttgagccataccaaaatatcctcatgtcaaaatagctgcagtaaagtggttctattaaaatagctgcctccaaagaactgagagtggagatgtcacctgcttctggcacctgactttggtcctcttctgcgtggcattgccttctgctctgctggattctggcgtatggctcatcagaggaggcactaacatcagggctgccttttatcttgctgatccaagcgaggactatgtaggtgtcacagatgaaactcgtccagaagccgaacaggatgctaatggcatggccacgtgtttccagcaccctgtgaggcagctggctggcatcaatcctctccccagcttccatcccacccccatccacccataagctcttcttgggtcagaaatgcaattctttgatggtgccagaca

SEQ ID NO: 374 - DNA, 433 bp, Homo sapiens
tagttgggaggagaaggtttccctaggagatgcacctgtctggcttccaggccgcgactgcgcaaactccggtcctgacactctagtctcaggtcccaactccggaagggttcaggcccaagcctgcacgtcgcgttgccatggcgaccgctggctgccctctccgctctgtcttttgagcacgtggcaccaggaccccgcgttctctccagctcgagagccaggtctggcccagagccgggctcatcagtattccgcctgcggcgtctccccgaccctccgccgtgcctcaccaggtccgcctatccagcagcgacagactcccgccgtccgcgcgaccccaccgcccccatcccagtccctccccgagggttcgcagcccgccctgccctcgagcgtgcctagcggccctgggcactggcgcggctctacc

SEQ ID NO: 375 - DNA, 472 bp, Homo sapiens
acctgtcaatgagacagccacagcctctgacagcaaagggaccagtaacagcagcaaaacccgggcaggagccaatagcaaaggccgtcggggcagccagaattcttcagagcaccgcccacctgccagcagcacttctgaggatgtcaaggccagcccttcctcagctaataagcggaaaaacaaacccctttcagacatggagctgaattctagctcagaggactccaaagggagcaagcgtgtccgtactaattccatgggctcagccactggcccccttcctgggacaaaggtagaacccactgttctggacagaaactgcccctcccccgtcctaattgactgtccccacccaaactgcaacaagaagtacaagcacatcaatggacttaagtaccaccaagctcatgcccatacagatgatgacagcaagccggaagcggatggggacagtgagtacggagaggaa

SEQ ID NO: 376 - DNA, 530 bp, Homo sapiens
gggtagcccctgcctcctttcccatcaggacctctgacgcccaggtctgcccacccactgcccctcactctattcccaccacatcctgaatcctgctccaccgccctgcctcggaagacccctgcagccctggggagaatgtgtggcggaaattctacccaagactccccaaataattggtcacctgctctcctggcccctaaaaccggggctctggtgttggcctgagctccacgggctgagtgctcggccaggcagttgttgaacctagtgacttacttacagggaccattcttcatcagctccctctgatgggactctgtccacatcagggcctgcttggtgcccggacctacccaggagctgcccagctcaccgcacaagaactcccaggagctcaagcctgggaggctcagacccagctccattctatcaatcaatcaatcaatcatcaagaccaaggtgctcctgacccccaggtaggaccctgccctggggccacgatgccctctgagccctgctttccctcc

SEQ ID NO: 377 - DNA, 504 bp, Homo sapiens
ggggtccctcccctctcctactgctatttctcaagcctacaaactaccgaccattttcaagctgtatcacagatttcacacccataaatctattaacaccaccctccaacccttcacatatcagcaaatgctgttgtccaaccaacagtcactgactgccaaaatctcatccacgtgttcatcccccatcccacagcccgtcccccatcccacagcccgtcccccatcccgcagcccgtcccccatcccgcagcccgtcccccatcccgcagcccgtcccccatcccgcagcccgtcctccatcccatagcccgtcctccatcccatagcccatcctcaatccccatccccatccctatcctggaacctccttcccagcacacccaccttcatccactacgacattcatttgcttcccatccctatctctgcccgcatcccacatgctccatctccatccctgtctcgcccttcaacatccatcttccaaccccagcctccatt

SEQ ID NO: 378 - DNA, 552 bp, Homo sapiens
gggatctttctccctctgtctccgccccctaatccatgctcccgataatgagggtgggggatggtggtaggagaacgctcggcgcctgcgcactagcttcaggccgcgggccggcccaagagcggaggtagagggaacgacgcatgcttgagaaatggcgggaaacagaggaggctcgaggcttgctcacacgcacacagccaactgcttctggaccgccttgctcacacgcacacagccaactgcttctggaccgcctgaaaggcaacctcgcccgccgcggtggtgtggggcgggcatcccttgagactgtgctctggaggcctggagaaacagctttctatcctcagcactggggagagcaggcctcaatccctgcctttgcctgccgcccctcttccttccctctcaaagcatacccagcagccccggcgctgagaaacgcgttactctcttatcagctgtgggagagacaagacagactggcctctgggcggaggggccgccattgcctgccctctggaccagggcctcacagataccctcagcttc

SEQ ID NO: 379 - DNA, 500 bp, Homo sapiens
agacaccctcatctccgactttgtggtcttgggacctgtggcctgggagtaggtgcccatattccttggagacatcttcatcctccttttcacggtctgggtggctccagaaatgatgcccattctctgtggaaacatccttgttctcatctggatggtctctagggctgtggaggtggtggcgaagctctgctgatgcctcctcggagagcccggcgactccagtgctgttgttccggtttctgaagcctagcccatcccctctgagctgctgggtcatggccggggggaggagcaggctggccaccccagcccagaggacagaagcgtgcagccatggcctatggtggcccatggggacggacaggcagcactggctccagctgcctctgcggcaatgtggacaaacgttggggtctttgtccctttggggttggtctctttttttctctgtgtctctcctttgtcctttcggtctctgtccaccttcctctggtcct

SEQ ID NO: 380 - DNA, 755 bp, Homo sapiens
cttcctgatgagggtagcagtggcttccccttccttctcacagcttcccacatggtcaccctccctccttcagcccatccatcagcacagcgttgtggggtccttaccatggcagtcgtccctccagccctggagatgcttcagggaagacccaggtccatgctgcaggcagactcagatcagcagagaagcatctcgcctctggctgtgccgtccaggttgagctgcgtgtggcagtgagcacagaggagaaatgcagggaagtaggggaagaaaagttgacttctttcttgacactggattgtgggttttctttcaaccaaatagtcccctcttaacttcccctttttaaatgtttttgctccagcgtccactccctcccccccgggaagaaacctctgagtctttcctgcctcctcggtgcccattgcgtccttagccgtccctctgcacctcaattcctggtcaacattttgggaacaatgacttatgtttgagctttgatttggggagtgggggagggagttgatatttatttgatgactggttatcatccgctgcctacgtgaccttggtttgtaatgtcccatcactgagcctcagtttcttcctttgcagattgttgtcatgaatcccactcgtcacagtggttgtggggtcagtggtgcctgggacattgggaggggctcatttgtgcttgatttccagaccagggtaagacctgaggctttgggacgtgagaggatcttgctgtt

SEQ ID NO: 381 - DNA, 598 bp, Homo sapiens
acctttccttctcagatccgtccatacatccctccctctccatctctggctcgacacccgggctcactattagttcccctacatccaccccgcagcctgctcttaacctctcctccccggcggctcagacccaattctcagtgtccttagcgcccccttcgggccacagcgttaagccacgccccccgggcccctcatccgttgccaagttcgctgagcgtccgcgtctggttgcctctccgccccacagggcatgttcgtgctgggcctaccctacgccatcctgcacggcggctacctggggttgtttctcatcatcttcgccgccgttgtgtgctgctacaccggcaagatcctcatcgcgtgcctgtacgaggagaatgaagacggcgaggtggtgcgcgtgcgggactcgtacgtggccatagccaacgcctgctgcgccccgcgcttcccaacgctgggcggccgagtggtgaacgtagcgcagatcatcgagctggtgatgacgtgcatcctgtacgtggtggtgagtggcaacctcatgtacaacagcttcccggggctgcccgtgtcgcagaagtcctggtccattatc

SEQ ID NO: 382 - DNA, 513 bp, Homo sapiens
acgggggacacaggagcaaggattaggagggggaaatggatgagggtaaaggtcgaggatgaggtaaaggtctcggaggataaggacccagggggaagcggggcgggagagagatgccacttcagcgcgaaccgctgcgggacccgctgggctcccagccgcgtcggcagcgggcccagctcatcagcatgcaggcaccgcctcctcatctgcatagagccgccctcctctcagccaaacctgccgctcatctgcataagccccgcctgctgaaggctctgcagcttgaatattttctgagcggaattggggaggatggctcctgcaccctctgggacccaagggctgtcaggcttcccccggcccagtgattctcaatcgggagggaatgtatctcccagcgtactttcggcaaggtttggagatatttttgatttcatgcctgtgctatcagcatctagtgggtggtggccagggatgctaaaatcctacaaagcacaggacggtccccac

SEQ ID NO: 383 - DNA, 505 bp, Homo sapiens
cagtggttcctccgccctgtgggagtggggggctcttatgctggaggggggacactggcctggacttctgctgaggctctgcccctcatccctgcaggacggactagccagtcctaacacaggactagcgttgctctaccacgtccaagcctcctctgagattcttcctccatgcaaccacttcccctggggcgtggccacctccctggaagccgccagcatgctcggctgggcccccgcactctggaggcttgagaatctctctatttttgaatgacgtccttatcctctgcccccaggctggtaaccaaaggtctgggggtggtgacgtgctgggaatggtgtaactcgtgagatggaggctgaatgtggaaatacatgaatgtgcttctcttctctccagttcccttgaagaatccaccttcctgcagggttgggggagcgcagaatgggaggaagatacaaataccaattttatagcaagaatgcaaaaagaggccagcgc

SEQ ID NO: 384 - DNA, 478 bp, Homo sapiens
tcctggactttcctgttgtctccctgttgaccttgctgtttccctgtctctgtctctgtgcgtccctgtgttccccgctgtctccccctccgcctctccctgcattcttgttgcttctgggctctccctgggaccttatgtgcattcgcctttccccaacgtgtcccttctcccctcctcctcatcctccgggcggcgtgcgcctcctgcctctccccggccggccacacggtggcgctgtgtcccgctcgcccgcccgcccgccgctcgcccgcagcctgcaagcgcaaggaacaggagcagcagaaggagcgcgccctgcagcccaagaagcagcgcctggtgttcaccgacctgcagcgacgcacgctgatcgccatcttcaaggagaacaagcggccgtccaaggagatgcaggtcaccatctcgcagcagctcggcttggagctcaacaccgtcagcaacttcttcatgaacg

SEQ ID NO: 385 - DNA, 8060 bp, Homo sapiens
aaggatgaaagcatgaatggagtttaagagaggatgggaaacctaacactcagctgatgacctaaaatacgccacatgtgtacctcgcatgtaatgattctactacatatgtatggagtcttaacatacgtatcatgcttgacatgtttttgaactttgtataaatggtattgtatgggatgtattctgctgttgcagaatgggagaagaactgcagacaaagtatagaaaactcttttagaagttttgttgtaaagggagtagagaaataggtgatagctgacagtagaaataggtcaaagagaagaatctgtaggattggaaaaatcacagctgcttgtaagcttatcagaatgacccagtagagaaatactgataaaacagaataggcggataattgctggagtgacagtgaggatcttgattaggcaagatagtactggaatctatgtcttggtgacaatactcctttagctaggagcacggcaattcaaccatgtgagggtggggaaggcaaagtagaggctggtatgtgggtgtgggtgatgctgagattctgtggaattttttctctcattgcttcaattttctaaacaaggctattaattgagaatgattgaggagaggacatgcaacttagaggacagagaacgtacaaaatccagaagaatggaggcgggaagtagaattgctggacagcattaagggtctatctgaggttcatggtgatgaaattaaagtgaaggtagtcagtgtgattgtgttcttctctcgccacattcagatgcatgggtgccagcttgaatcagggttgtggctttgccaagcaagcacaacaaagggaaaaaaaggcaagggggctgagggcatgtgtaagagtgattgtgattggctgggggttgaggctgggtgacagcagatatgagggttcaagaattgttgcagttagagtactatagggagtgatctggaaaactgaggtagtgatcagggtgtgagatgtttgaaactgagataatgaagaagttgcagagtttgataaggctacggtgattatgaccatgggaggaagtggctgagttaggatatgtgcaagtttgaagttagagaaggtacaaaatctagaatgatcaaggggaggatgtgtaagttagaggacagagaaggtataaaatccagaagagtggatcagggaagtataagagaattgctgaacagcactaagggtctacctgaggttaatggtgaacagtgggagtctccagccaacagccaggaaggactgaggctatcagtcctgaggcctgcaaggaactgaatgctgccaacaaccacatgagcttggaagcagatccgctatcccagcctcactttgtagaggacccagctaagcaacgcctggactcctgacccagagaaactgtaagatcataaaattgaagcaatgaagaagatccttgagaagaagaaaaggaactgagaggccagggtactgggaagatcttataaccacctaccactaggacagaagtggcattggagtgaatgtcaggagcaaattgtgcagagatgaagcggggtgaggtcagcgatagaggtatcggacagcaagatttaaagctgccggtttagaggaggagggggatgacctggaagcaatgttgagaagcaagaaggaaacctatctcacctccaggcactaagaagctgaaggttgaaaacacagttgccggaagtagttctgtcctgtggggttcggcatcatgcaagttccccctgggctgttctctgatacagggcacttgctccacactctgggaacccagattaaccagtctgccctgtcacatagttgaaggagttgcatttatctttctggctcccaattcctttaaaattacatttgttgcagaacctccacaaggctaaataaaataaaattacatttgtgaccatcagagaactgaagaactattaactggctgttctggttttgctgagatcgggctgttgacagttcctggttgtcccacagctacccatgtcagttatctccactaacatttccaagaatctttgtaggacaatttctccacctgcaaggtctttcaagtaagaactcttctttcctttaaggcaattagcccattgccaaaaggttttactgtcttaaagctggaactatctgagatctaattccaaggacttttctacagctaagtgagatgcctcacaccagtattaggtgattcttcgtgaggacagaacagagcattttcatcttgtgtttaaagcaatttgttggcttcggctcctcaccactttctataccagtctcccattcacgtccctagtaatgcctatgccaaaaaaaaagaaaaaaaagaaaaagctgacggtgaaacctacaggtttaagggcttaaatctcaacctttgtgttaggagtaacaggagtgtgctgagagggcaagcaataaaacaagtcataccaaaaggccacattggtctctcctaagccccaatcccactccactcctgtggccagtagtccaaacagaaaataactggagaagacgaggaggtcaaggatcaggaaactaaacgttatgtgaattcaccagcaagatgtacagaacgcttgcgtttacattgtttttatggaactagcagaataaaactgatctattttaaaaatgaaaaaaaaaaaaaaacaaaagaaagaaaacacagttgccactacttgagaggtggaaggaggagcagtgtcccagggcaaagttgggtttccttaagtaaaaaggtgaagggaacctgaagggaaattctgagaagaggttgagcttacagggaatatcatttgcataaataaatacatggtgtggtagactctaaagaggccccatatgattcccacctcctggtgttcaagcttttgtgtgtttccttccccttcaatgtaggtggcgcctgtgatttgcttctggccagcaatgtatggcaaaggtgacagagtatgagtgatactgtgtatgtgatgatgttacataagattgaaaccagtgtcttgctgagactcttcccgttgctggcttcgaagaggcaagctgccatattgttagcttccctatggagagcaccacatggcaaggaacagagggggtctccagccaacagcctgcaaaggactaaggccctcagtcctgtagcctgcaaggaactgaatggtgccaacaaccacatgaacttggaagcagatcctttgttccagcctcactttgtagaggacccagctaagccatgcctggaatcctgactcagagaatctgtaagatcataaatgtttgttgttttaggcttctatatttgtggtgagattgttatacagcaataggtaactaatacagacggaatagaagaagtttagttataacaatgtctcaatttcttaaaaacttcttctgaggtatattacctaagattcacatattgatctgttaccaaatcatgttttgtaatctatcagctgacagatcttccttcagttttgttgacagaaaagatttgaaaactatctgacttgaaaaataatttaatatccattcactaaggtcatttactttctcagcatagataccgatttttgaattgtcccttttggattgctggggaggttctgcattgatcccatgcaccttagtagtgggtgagaattttgactttcttctgtaaggtgggaggacagttttgaaaggggatgctgtgtcctcagctcctttctcaagctgggcaagtttagaaaatagaatatatagcaatggaagatgtggaaatgaattcccttaaaactggtctccataaaccccaggggtaagagaacaccagtttggagctttaggggctttctggtcaaagagggaatggcccaggcggtgatgtggaggatagaatgaagcactgagtatgagtggcgaaggcgtacggtgggtgtagagattttctgggcgacgtgacctaagaaatgactttagaactggctaatcattggttttggagggactaaaagtagttcctggttggtgaaaataaatcattaatgcgttttaaatgaaaaagaaatgcatgcgtcttgtaaaaaatgtgaaataaaagaggcataaagtcaaaagcagagcctatgccttcccccaccaaacaaacaggtaacctagttaacaggtgtgtcgtaggattcgaagttcgcctccagctccgagagtgcgcctacatctcttccaacaaaatccactcacacttgcaacgcctggcaaggctcttcaatatgtgattccttgactgtcctgtgcgtctctcgagtgtaaacacctctggggctcgtgattcggggctgccagaaagagaaggaaggtgccgccagcgtctgtttcttcccgaagtgaactcctacaacctagccaccttctccccagagctgtcgactggctgttgaaggccaatttttgtgcctacgcaggtcctcaacacagaacaaaacaaaaaaacaacaaaggccgggctaatagctatttataaacacttactggacgcccactctacgccgagctctcccgcgctccttggatacttttttgcaacgagatgccaatttccccggcgaccactccctcaaacaggccttcgcctccgcccgcgctgaggcccaggcccaggtccagattcagagccgcccgccggctggcgctgccctgtaggcgcctgcgcagagcgaccctccccgtcactcggagcgggaggcgggggcagccgggagaaaggaaagctgcgggggaaaagggccaaaccctgaaattacccggatgtggtccccgcgcgcgcatgctcagtggcttctcgacaagttggcagcaacaacacggccctggtcgtcgtcgccgctgcggtaacggagcggtttgggtggcggagcctgcgttcgcgccttcccgctctcctcgggaggcccttcctgctctcccctaggctccgcggccgcccagggggtgggagcgggtgaggggagccaggcgcccagcgagagaggccccccgccgcagggcggcccgggagctcgaggcggtccggcccgcgcgggcagcggcgcggcgctgaggaggggcggcctggccgggacgcctcggggcgggggccgaggagctctccgggccgccggggaaagctacgggcccggtgcgtccgcggaccagcagcgcgggagagcggactcccctcgccaccgcccgagcccaggtaaccgcgccatgtcccctccccttcccccggccgggcccgcgcaccccgcctgtggcttccccgccccggggcgggctcccgacgacggcggcggcggcggcggcggctgggagcgcgcggaatcctctgggagggcgaccgcggcggcctgacgagccgggccgggcgggccggctgaatgccgggcggcggtgcctcgcgtccctcgggcccccagctccgcttgcagctcgtgggagaatcaagttaaactcggacgggactcctgccgcggccgccgctcctctttgttgttctcagtagtttcacggtcgccccggctgagcgcgttgggtcggctggaatgtgttgccttagggtctaagtgaaagttgtaaattgtttgtctaaatttattttctccagccaatttctgttttgtctttgtcccctactttctcttcctagtcttgtcatgccagtttacgcttctggctttgatatgtttactttttgagtactgagagtgacagcggtatgcaggacacattcttagcacctaactgaacccctccttgcccccaataaaacatgcttcctaataaaagacacagctgatcttactgttagcactgcatgtactgacagtgaaattggtgtagggtggagggcggtggctccatcacttgtcccaaactgctgttaggatttctcaaactagattttcaaagacacaagtgtgtttagttaacctgaaaggtttatttgctggtgcagaggctttaaaaagccctgttgaagattgatagctgtttcccttcaaaaacctaagtacgtttgtttttatttaaaaaaacacatttatttcccaattagtttcttaatgcatttagtttttgcaccgtagtttaaggtggaattgccagttatttaggaataataaacacaacaggataatagcggaattaccctgaattgactttctgcaaacatataatcttagctaatttttgttagtaacctttgacttttgccagaattagcatccttctagtcttagtagcagcttggttactcgggtgttttaagaagtaggttcactcctttttgctggcaaaaaccatttagtatcaaaaaaaaaaaaatgcgtaatttcgtaattagatttagaacaaggcatttgaataatttttatggtggatttcataaattacttttgccataccctgcagagactagataatatatatttcagttgaaatctaggaagttctaaaatgtaacttttttttaatgctaaggacttactctctctatattggaaagttctgatatgattagtacataatattccaaactgtaaaatgattaacatttaaaaatacggtttttaaaattagtgtttcttccataatgctgtcatgattttgtttacttaaatgggtttgttacagaacaaatgtaatagagatggaccaagcatttgtaattcggagtagctttaggtctaaagacgatggtgaattatgtaggtttaagttgttggaattaaaactaaaagcttcttttgataaaagtcgttataacattttgtgactctattaatagaagtggctttttctttgctttccaggtttttgggcgagttttaaagaagtattgcatcttcgttttttttatttttgaagtgggagtgtatgtttctgtttaggtcactgccttcattgtaaatcttgagtttagaaaaaaccaaactgcaaatctgtttttcagacttaatgaaaatttgtgccgagaaagtcactttgaaatattttggaataagttttacatgaatgattgatcttttatgatagctttgctgtttgaagcaattctccctctactaggaagcagcaaatcttacttttaaaaacctctgcttcactttcttaagctacattttagtcgagcgattgtgtgtgaattctttttctgtattccccttcagtttttctttctccccgcaaattaaggagcgagaattaacctaatttatgctgcccagtcacactccagctctcccacttggaagcagtttttttctgattgagccagtgttatagtaacatcattagacactattctaattgaggtgtgagttactgaggcctctgctagggaggttaaccctacagaatctgtagggttcattatatttaaactgcatatttcggcttgtctaaatttttgcctattttggtgaaaacatgttgttttgtcgatgtttaaacttagttcattttgtccctctctagttcatgactaaccatttttttcatttttaatccagcgatttttttagagtggttctttaagcatcttgtattagccatttcaatggtcattatatatgtttggatttctcttattttgttgaactagaagactgtgtggttacgccccaaaatttttttttgtcttaaagccatgatgaatggggtgactctgaggtgaccattaatcgcgtataaaagtaacctgactaaaatgttttcattgttttctacagttaaaggacttacaccagcataacacagcatttttttttttttttttttttgagatggaggctcgctctgttgtccaggctggagtgcagaggcgcgatctccactcactgcaaaccccgccttccgggttcaagcgattctcctgcgtcagcctcctgagtagctgggattacaggcatgtgccaccacgcttggctaatttttgtgtttttagtagagacgaggtttcgccatgttggcc

SEQ ID NO: 386 - DNA, 8060 bp, Homo sapiens
agagagttccattcaaacacatctgctaccaaaaataaaaataaaaaataaaaaaaaataaaagcagctcaagtgttacagtggatgtagtgattatttacaggcaaatctggccatctcatctccacctctggaagctctctggctttcagcatatgccccaagtcagctcaaacttcatctacatttcaggggtagaaaccctcttccccagtttctggatctgcattgtcattcagctgcatgtctcccacatgcaaacacgcgcgcactcgcgcgcacacacacaagtgtttccatacgtacaaatgaacgcattagaaaattaccgtcattttttaaaaggctccaggattctgacgagtcagcttgaagagctcaaaacatttcatttcaattctgcagatctgaagaaaaagaaaggggggaggggtggaagtacagatgcaataccgtattaatattcagatacactataatctccttttcattgatccacaggtccctttatacactgccgctccattctcagccgcagacgtgatgctaaaatcattttaactgcagcggttttcgcttggctttggccagtcttcaatttactgcagctggaaaaggattagccatttttgctggaatcctttccttctaagcgctcaaaggcaggacccatcttcatgaaagagccaagtgcgggggccggggggacccggcgttgcggggagttggggcgcggaaatcagggcagtagacgtgcattcgcgggactctcagaagcacgtctcaggctactatcacgcccatggacactagccctccttaactccttgccaggaggaaatggcaacgtatctccaggtcggaaaacgactctacttttcccgcaggttgtggtggtgtattcttgggtcattcattaccagaaagcagcaaaggaccttcctatctctttgcataaaaaggagattgaataggggcttctttcgtgaataaacaaccaattccttgctagtggcccattaattaaaaatatatatttatagatctttccttagagaactggcattctatccactctccagcattaaagagttcgcgctgtgttttaacttcacaagaactagctatgtggatgtgccgcgttgcccctgcgcctccggaaggggcactcacagctggtcaagcgcgtccttcggaactcggggaggctccgttggggcttacacagagctaagccctgggccagggaggatggatgcaagtaccgtgcatgtgcaaacgtgttcgcagatacccgcagcggtgcacactcgggcccctcgtgtgcacgggccctgcccaccaccccgcccgcgttcgccgccgccccactgtcctcatcccgcgggctgaccccaggattggcagaaatcagtggtctaatctagcatggtgggtaaagggatcgatctccaattgccaaaaaaaaaatagaaaatagccggtgttcccagccgctgcgtggcacttggccgcacaaggcgcagggatatcagaggcgctttgcagcgcttggcggtgctgtgtgccggatgccccagagcccggcgttaggatggcgggcttgtaggaagcggctcaaatcaactcctcagtcactgatgaacgcgctcacggctcgaagctaggtcctcgagtgagttaatctacttggtaagtattttgtgaatatgtattttgggaggaaagaagcacgtcgaacgcgtctgcccgtctgtaagcgctgtcatccccacatcctttagcgtgaattcctccgctttttaggagtcacctccaccccctactccgtatgcttcgcgcctttcctcacggccccgtcagaccccctcacctttagattgacacatgccatataatactcacttttaaaatgccctgccagtctctgctagggtcccttaattaggtaacccttgccaattagtgggccctgcgctactttttcccttctcgatgatttatttccatgatgcgtattagggaaaataccttaaaggaaaaagaatgttagcatcattggaaatcccgctcctaggagaggatatcgcagctgttgctattatgttttcgcatttgctgatgcaaacaggggaacctctctattccctccccattacctgcggctggggactgggaactttccgcggcattgtccccagccagcgcctcgggacctgcggggctgttctcgctctcacactcacactcaccccggccgctcgggcgagagttctgtcccgccccgcccggctgccgcgtgacgtgtctgtttggcggccagtttggccaatcatcggcagctcggtgggtggtgctcctgggcgattggttggcagaatgagggcgctgcgcaaaaacggagaagccgagcgctcggagctcagaaactgccagcccagaccacaggctcagaggctgaagcaggaggaaggaaggactggaaggaaaaagagacaggttagagggaaagaggcttgggaagaaaacagcagaaaagaaactgctcattacacttacagagaggcaagtaacggtggagatgaggacagagggaaccaagactctgaaagacaaaaaatacaaatagagcgaaagaggaaaaaaatgtcaagaagaacatccatccggagaaatgaagagaatgaaagttttaagctgcagagccgttctgtgcttttccggcacaaaattatatcgctgattttaagcccttttgcatttgccagccgttgacattaagaggcatgtttaacggtgccaacagcatctccttttccttctcctcttcctcttcttcttcttcctcctcctcctcctctttttcctcctcctcgttctcctcccatcagcaagaagacaaaccgaggacagtcttgaaatatcgaaatttcctctttgggatttgccagcgccaagactgtcggaataaaggacgctgactattgtattattgttattttattaattagtcagtggaaagattacagatgaggaaaggggacgcctgtcacccttcctgtgctaagatttaaaaaaaaatgaggctggattgcgggaagctctaaaatgaagcaaaaggagtaagatttttaaagacagaaagccacaggagcccccacgtagcgcacttttatttgtattttttcagatttttttttgtttcgtggtggtgggggaggtgattgggtggctgactggctgcgggaagctacttcctttccttttggagatgattgtgctattattgtttgccttgctctggatggtggaaggagtcttttcccagcttcactacacggtacaggaggagcaggaacatggcactttcgtggggaatatcgctgaagatctgggtctggacattacaaaactttcggctcgcgggtttcagacggtgcccaactcaaggaccccttacttagacctcaacctggagacaggggtgctgtacgtgaacgagaaaatagaccgcgaacaaatctgcaaacagagcccctcctgtgtcctgcacctggaggtctttctggagaaccccctggagctgttccaggtggagatcgaggtgctggacattaatgacaaccccccctctttcccggagccagacctgacggtggaaatctctgagagcgccacgccaggcactcgcttccccttggagagcgcattcgacccagacgtgggcaccaactccttgcgcgactacgagatcacccccaacagctacttctccctggacgtgcagacccagggggatggcaaccgattcgctgagctggtgctggagaagccactggaccgagagcagcaagcggtgcaccgctacgtgctgaccgcggtggacggaggaggtgggggaggagtaggagaaggagggggaggtggcgggggagcaggcctgcccccccagcagcagcgcaccggcacggccctactcaccatccgagtgctggactccaatgacaatgtgcccgctttcgaccaacccgtctacactgtgtccctaccagagaactctcccccaggcactctcgtgatccagctcaacgccaccgacccggacgagggccagaacggtgaggtcgtgtactccttcagcagccacatttcgccccgggcgcgggagcttttcggactctcgccgcgcactggcagactggaggtaagcggcgagttggactatgaagagagcccagtgtaccaagtgtacgtgcaagccaaggacctgggccccaacgccgtgcctgcgcactgcaaggtgctagtgcgagtactggatgctaatgacaacgcgccagagatcagcttcagcaccgtgaaggaagcggtgagtgagggcgcggcgcccggcactgtggtggcccttttcagcgtgactgaccgcgactcagaggagaatgggcaggtgcagtgcgagctactgggagacgtgcctttccgcctcaagtcttcctttaagaattactacaccatcgttaccgaagcccccctggaccgagaggcgggggactcctacaccctgactgtagtggctcgggaccggggcgagcctgcgctctccaccagtaagtcgatccaggtacaagtgtcggatgtgaacgacaacgcgccgcgtttcagccagccggtctacgacgtgtatgtgactgaaaacaacgtgcctggcgcctacatctacgcggtgagcgccaccgaccgggatgagggcgccaacgcccagcttgcctactctatcctcgagtgccagatccagggcatgagcgtcttcacctacgtttctatcaactctgagaacggctacttgtacgccctgcgctccttcgactatgagcagctgaaggacttcagttttcaggtggaagcccgggacgctggcagcccccaggcgctggctggtaacgccactgtcaacatcctcatagtggatcaaaatgacaacgcccctgccatcgtggcgcctctaccagggcgcaacgggactccagcgcgtgaggtgctgccccgctcggcggagccgggttacctgctcacccgcgtggccgccgtggacgcggacgacggcgagaacgcccggctcacttacagcatcgtgcgtggcaacgaaatgaacctctttcgcatggactggcgcaccggggagctgcgcacagcacgccgagtcccggccaagcgcgacccccagcggccttatgagctggtgatcgaggtgcgcgaccatgggcagccgcccctttcctccaccgccaccctggtggttcagctggtggatggcgccgtggagccccagggcgggggcgggagcggaggcggagggtcaggagagcaccagcgccccagtcgctctggcggcggggaaacctcgctagacctcaccctcatcctcatcatcgcgttgggctcggtgtccttcatcttcctgctggccatgatcgtgctggccgtgcgttgccaaaaagagaagaagctcaacatctatacttgtctggccagcgattgctgcctctgctgctgctgctgcggtggcggaggttcgacctgctgtggccgccaagcccgggcgcgcaagaagaaactcagcaagtcagacatcatgctggtgcagagctccaatgtacccagtaacccggcccaggtgccgatagaggagtccgggggctttggctcccaccaccacaaccagaattactgctatcaggtatgcctgacccctgagtccgccaagaccgacctgatgtttcttaagccctgcagcccttcgcggagtacggacactgagcacaacccctgcggggccatcgtcaccggttacaccgaccagcagcctgatatcatctccaacggaagcattttgtccaacgaggtaaggctgaagcgaaaggaccaccatctctcatctcctccatcagaaagcctcctctagcccggcccttgtatctctggtgcactgtatctatttttaggatattagcttatgtgtatcgttgtgggagcagagatgggcggtcaccttctcccactccttcgtgtgtaacctaactttcgcgttgttccaccctttcacatttattttcattccgtccccttggtactttgccaccttggagctccctcctttgctcttccatcctgtcagtcctttcccttctcagtaacctgggcatgaagggaaactgcgtgaagggagagggaaatgtggaggagggacttactttctagcactggcaaaggtcttttttctttgcgtctgtcccaggcattaataaagttggctctattttgctttgtttaacgatgcttttagtcgcgtgtacaagtaagctatagattgtttaactttacacagttgtctaacctcgaattcatgttttagtgaacaagttaccagatccttctcctctgaactcgggttgcaaaaaaagccttcagttcggctctggacagcatttacagacgctcttgaagccgagcgcccacacagtgtgaatttgaatgaagctgcgttggcacaaacccctgttaagagtaaactaacgaaaggcttaaacaattgttgtcttaaatatatctttttagctaataatcaccttcttgccactgttttggataaatcacgctgttggctttcttcataaaagaatttggcttgtcaattctgacttctttttaaaaggatggagaagtgacaaagtcggagggtgggggttggggggagaacaaagttggtttatgtgaaagaaagcttggaccggaaaggtgtgtgggtggtagaggtggggaggcgaatgcagagggcctttggaggggaaaagaatgggggtggtggggggcgggcaggattatgaactcctttcctggcaggttattttatttgagtcttagatattattaattgactttcatgaatatttgtacagctcatttgtatcttaagcacattttgaaaataaacaacaacataattccatgaaatatccaaactttttgcttattgagcgtgctgtttttcttgtgtcaaccagtatgcacctaaacacttttttaagccactgaaggaaaagacagcagaatataaacaggttgactctgttagagacaatagtatatgagctctagccatgaggtcatttgcattttctctttaaaaaacacacacacatttaaagttagccaatttttttttaacctttacaagtgactaaaatgtggatttaagtgtccctgcatatctcccctgcccttacacagcaatcactaggatgaggttttaggagagcttggaaattcataaaaatgtatacaattacttaagctagatatagttcctaacctcaaaagtagactgctagttcaacccatagcattcaaatgctcttgatttatttatttttttcctagactaaacaccagcgagcagagctcagctatctagttgacagacctcgccgagttaacaggtatggactctttttttccctagcagtaatggacaatttacaacctagtaaaagtaggaagtaggtatattattctaaattaaaattgaaatgtataaaatattttcaattaaggcaggacataaatatgaactatattgtgtttcctagacaatacattaaaaattatacattatatttcatttatatacaacgcttaaactatatttgaatattttgtcaatttacactcctacacagcttccgatagtcttcctcactgttccaaatgtatatttatatctattttatgaaaatgatataaacatgtatttagctccaattatagagtaatgcctaaactttacatgacttaagtgctcaaaatgactgttaatcgatcatttttaaatagttaagcttaggctataaaaactagctttatgcagaaacaaagccaactaagaggtctgtgagtctgcagcaccatctgtgaccatgtggtggcagaagaatgttttctgtgtttcttcaccttttttattctaatattcacatttttgtacttctagttctgcattccag

SEQ ID NO: 387 - DNA, 8060 bp, Homo sapiens
accagcctgggcaacttggtgataccccatctcttcaaaaaatacacaccagaaacaaacaaacaacaaactagccagatgtgatagtgcatacctgtagtcccagctacttgggaggctaagatgggaggatcacttgtgcctggggaagtcaaggctgcagtgagcagtgattgcaccactgcacttcagcttgggcaatggaatgagaccttgttcaaaaaggctgggcacagtggctcaggcctgtaatcccagcactttgggaggcagaagcaggaggactgctggaggccaggagttagagagcaacctaggcaacatagaaagaccctgtctctacaaaaatttttttaacggaaattcaactcaaatttgtgtgtacccccacaaaaaaagaatttttttttcttcatcatcctggaaaatctgggcatgggtggattcaggagttcagaagttcaaagataagactgtctctccatgtcctggccctgccaacctctgcttggtttgattctcagattccctcctcagagcagcaagatgactgctgtcaacacaagccattcttatagctcatgatctcagagtaagatggaccttccttttctgagcagacatccattaaatctcacggagggataccaattggctcttctggggttgcatattcatccttgaaccaattactgtggctggattggtcagacctgggttagaaggaaggatcagccccttaaactatactgaatgagttccctgcagaaaggaggggttctgccttcagaagaagagggaagggattctaggcaggaaaacgaaataatgacagctattcacagtcattcactgtgcttggcacagggaatataccagtaaccaggacagagaatttcactgtctttaaggagcttacattctagctggggaaatacacaaaaataaacaagcagatgaaataattacaaattatgttgaagcaaggaaatgaaatagaaaataatggtgggaacatttttaaaattaatatgggctggaaagacctctttgagtgggtaatatttaagctgagccccagaggctagaaaagagccagtatgtaaacagtgggaagaaatgggctccacgcagtgggaacaggtgtgagaagagactgaaatgggaaagagcttgacactttagagaagagtagggaggccagaatgtagacagcaagggtggagtggctcaaagtagactagagagggaaaaaataaccagagtatggaacaccttataatgcaaagcttgaggatttaaaaaaatggtttggagtgttatgattggaggtgatcaaaggtaaaagtcagaagttccaccagttcggaggccactgtagaatccagagagatgatgatgggcctgggtggcctgccatgaccttatcatgatgtcattatggtgggagtgggttgttataaaatgagtccagccctggtgcctctctttcatgttcagccctcccaccatgttatgctatgctgcatcaagaaagactcaccagatgccacagccatgcacttggatgccccagcctccagagctatgagaaataaattctttataaattacccagtctcaggtattctattatagcaacataaaatgaactaagacagacttggaaaagaattcattctatgtgatcattataatctttcccaataagcagactccttgagaagcaagtcatgtcagaaagctgcctgtgcccagtgcagtggctcatgcctgtaaccccagcactttgggaggccaaagtgggtggatcgcttgagctcaggagtttgagaccatcctgggcaacatggcaaaaccctgtctctacaaaaaaataccaaaaattagccaggcgtggtggcatgcgcctgtagtcccagccactcaagaggctgaggtgggagaatggtgtgagttcaagaggcagaagttgcagtgagtcaagattgctccactgcactccagcctggacgacagagccagaccctgtcccaaataaaaaagaaggaaagaaagctaaacatgaatattttgatatacagtggcaccacattcatagcaagtgggcctaaaagataggctgtaacaattgcagtctattggcttagatcccctcctttctgcagtttttgagaaggcacagcctctatgatgctcattctgtacattcacagtggcctgaatccccctctttcaattgacatgttctttggactttcgaagacatttcatgtaaccagggactacttttactgatttaagggccatcctgcctctttaaggtggatttacataactcctccctgattggtttaaaggttgagttaaaactctctgagagtagctttatttctccttccaagttttgggggatatttcctgaacttccatacaatattacacacatctctatcaaagtaaggttgaaggagattccgattcatatacgcacatgctagaatgaatcttctagttccattccagataacattcacaatccaaaatatttctcttctaacttttcttagcatctatgagactaagtacatacaaggaatacccagtaacgagcaaaaggggtacttgggtttactaaatattttaacagacaacttattcctcaacacctctagtcccttcccttgaaaataaacacatcagtaaaactccaccacttctattcccctctatcacactgtcaccaccatgaaaattagctgaaagcactcctcaaggattgagagacggccaggccacctatgtttttaaagtctcttggtataataagtgataaaaaagagaggatgccaaaaacagggttacaagaagtgtggtatatttaaaagataccacagttaacaaattaatggacgcacccacagaacacagcacacagttgtactgttcacaagataattacagccctttataaaaagtagctgatagcatgcttcagtagatagtgagccctgtaatgagacacaagttgtagatgaatatatttttcttttaatccagtcagtgtttctttgtgactgtgtatagaacttcatgtggagataaagtaaaacattcaagtttgagactcttcttgaatgtaagcttatgtcaaatgtcgcactggtggatccacctcccccacaccccccgccccccgcccccgctccattctgatggtcgtgcatttaactagaaattgatggaaatcagtgttagtaactgagggccttagaatattatcagtctcggcatcctctcccagcatgattaggggacaaaagcccgtatagagattgtgtccaggaacctctgggcacaagctctttacagattgcctctggggtctgaggggcgccctaactagattagaaactgacatgttctaccccagggcctccgcgaacgacagcaggcgagaatccttgctctggacacggggaacagggtcagcatctcgtctcctatctccaccgacctgtctctggcttttcttagtccccagatgcgcccagaaggtcctggagagtggtgcgtccccttggcaaccgtacaacgcgcaggaaggcggagtgagatgaggctgagtccggccggggcggggctgtgtgggactagggcggggctcgggggctagaccggggcggggctgtgtagggctggggcggggctcggggcggggctcggggcggggctgggcgcggggggccccggcagcccttatcgtatcgcgcagagagcaaactgcgcctgggcaaccagtcgggagggtgagtcccgcgcgcgacagaagcttctggcgcgaatggagaaccaagagtttctaagttcatctgcgccgtccgaggtgaccgatgggcaggtctcaacagaaatatccacttgctccgaagtcttccagaagcccattgtgctcaggattctcgacactcacagagagcttgaggagtccgaggatcccgagaaacacgagaatcccgaggaacccgaggaggtcagggagcaagaccagagagacgagtccgaggaatgtgatgagcctcatgagtcctatgagccccacgctccctatgcgccccacaagccccgggactcctatgcaccttacgaactccatgggccccatgcagcccccaaactcctcaaggcccgtgaaccccgccagctccgccacacccgtgagccccgcaagtcccgcgaggccaaggaaaccgagttgcttcccagcgccgcagtaatgatctccccctctctgatcaccagagccccgccacggcctcagctgtctttcctgggtggtaggtgttccccttccctcgtcccctctcctgcttctcccttcccctcattccccacgcgctgagcacccacgccccatctagaaccgggggtcctaaggtggaggtttgcatgcaagagcttgccatattgaaaagaactcgtgtcatttacctgttgcttcgcagtcatcagcccttgcgtttcaagggactcagatgggaaactgacaccctgataatgagagaagctgaatctcttgtcttccactgctatctaatgagctattgttacctccttttgaagcccttcttcattcgcctctacagttagtcattgcatccctctgggttgcactttgaatgttacccttattagagcacttaagatcttgtatttcaccattcatctttctctttaactaaagagagtgatccttgaagggaggatattttcgtcagtgtttggcatatggtcacatgtggaaacaaagcattcattgagcaagtattcaaagagtatgcatctacaaagtgctcacgatatgctcagtcctcaccaccttcacaaggtaacagagcagatgggacttggttataaacatccttgctctgaccccactcgctcatttatgacccctcactaatgacccaacccaaagcaattatttgtcctcattggaccgccaatcttttgggaaaccaatttttatcttatgttctcactgactgctccttatccagcctcgattccatggtctgccattgcagttgctcccttatgtcttccaccattccattggctctctggttatccatcatacttctgacaaaacctcaaccctgattaaacccagccgtccatctactcgcttcctacacctcagcagttgactcttgctgtgcaaaattgcacagtcatactgtctggtttatttcaatttcatttcaactggtcacttggcactgcctggcaagctcactttattcccttagtaagttggttttcccagtctctgaagatgactaactgccttactctcctctaaacttcacacctttgacccccccacccagctgaagactttgccccattctttatcgagaaaatagaagtgatcaatcatgaaatcccttattttcttacaatggatctattgctttacccgcatctgtacccatgaattctgccttttctcatatttcagggaagaattgtgcctttttttttaatgaaaagcaaaatccttcacttatgctttagataccactctcatttcctgaagaactttcttcctgcagttatcctctctcttctacagcatcaatttctccctaattaatcagtaccatcatacacatattctagaatcttccatcttgaaataactcttgaccccatgtcattttcagactctccccttccaccagcatcacccccatttctctgttgttcttcattgcagaacttgtcaaaagagttgtctatactcactgactcaatttcttcacctctcattctcaacacatttggttaggcttctttcctctactctcccaaaactgctctagtttactgcttttctctctgccgccactcctatcatcatgcatggagatttcatatccacttggatgatccatttggcttctcagttctctgatctcctcacttggaaagatcttgtccttcaccccatcgtaggcacccactatcaaagccattgttaactgctctaccatttccagactatttcaagcactctaatctctaaccatgtcttagctttccagctcactcctccatgaacccccctatcaaattttcagcttaagggacttcaaatccattgatcctatgaacttttcattatatatcactatcttatgtcctgctgtctctcctcaccttatattccatggaccaacaatggaattactcccttgattctctctccctctgtcattcttgccttgttaaatcgaacccttgcctgcacttggaataacagataatggcaagagaaaggcaaacaactatgccaactatgataactgacctttaaatccatgcccctgaacttcaagtgggctctcagtgctgcttgccagtcatactgtatttccacagtcaatttattttccagctgtcccagaaattatggtgagtgctctcattcctcaaccttatgcatcctttcctcctcgctcttagctgatgatttcacttttttcttcactgagaatagaagaaattctgaaagatctacatatctttccaccatgaaatctaccaaaataccagcatctatacatatgtactctacattttttcctgttaataatggatgaaatgtccttgctcttattaaaggcctttccctcaatctatatgttggatttcaatcccatctaacttctttaagctctttgctcctaaaattagcctctctctcctgcatcattgtattcctcctctgctggatcattcccatcagcatacaaacatgtgcaatggaccggatgcggtgcctcaaatctgtaatcccagcactttgagaggccgaggtggaaggatcacttgaggctggaattcaaaatcagcctgagcaacatagtgagacctcctttctacaaaaaaaaaaaaaaaattattaaccacgcatggtggcacatacctgtagccccagttactggtagactgaggcaggagcatcacctcagactcagcagtttgaggcaacagtgaggtatgatcatgccactgtactccagcctgggcagcagaacaagactctgtctcaagaacaaaaacaaaaactaaaaccaactaaccaaacaacaacaacgacaacagcaaaatgcacaataactcttatctttaagaaaccccaaaccttccttgaaccccatgtgcccgtccaggtaccatgatttctttgctctgctttagaggaaaaatttctcaattgaattgcctgcaagtcatcatatccatgtcctctttccccctttttcccccttctctagagaaccacttacattttcatcccctccacttagctgcagtggcttttgttgaggtcacaatgatcgctgccttgtgaaattcaatggctaattcttcatcttcatcttactcatttgacacattaacctcttattttcttagaagtcttctttacttgacttctgggatgcctctacctctgttgtcctacctcactgattgttctttagtcagtttcctttgctgaatcctcctcttcccagcctttaggttgaagtgaccaatggcttagtcctctcagattcattcttctagaactttccttattccctgggtgaggtcatcagttccatggccttaactatattctggtaacttcccaaattatctctagcctcagtttttcccctaaactcaagttttataaccagtcattgatttatcgtccccgcttgaatatcaatttggcatgtaaaacataaggtgggctgggtgcagtggcttacgcctgtaatcccagcactttgggaggctcaggtgggtgaattacctgaggtcaggggttcgagaccagcctcgccaacatggtgaaaccccgtctctgctaaaaatacaaaaaaaatagctaggcgtggtggcgcatgcctgtaatcccagctactcgggaggctaaggcaggagaatcgcttgaacctgggaggtggaagttgcagtgagccaagattgcaccattg

SEQ ID NO: 388 - DNA, 8060 bp, Homo sapiens
acgctcagatactcagggacggaaggcccctcctgccgcggccatgctcatgcttttcagcttattatcttttttccacttcattctccggttttggaaccagattttaatttgtctctcggagaggcaaagagcatgtgctatttcaatcctccttctgcgggtcaggtaacggttgaagtggaactccttctccagctccagggtctggtagcgcgtgtaggccgtccgggcccttttgccttccgggccgcctatgttgtctgcaatagaaaagtcagcggtttagccaccaactcctgtcttccaaagtccgccagggggacaagcttgggtcatgagcagggaacccaggcgaaaagctcaacaagttctgcctaccagcccgcacacccctcccgaatttccttctctcttcctttctagaaagaaaacaatacgatttggaccctgggaacaatctgcccatctgaggctggggccgtgtcccggcggactccggctttccctggcccctctcctgccccctccgccctgccccgggcgccccgatcgggaggcacagccctcccaggctgcccaccgcacagaaacccaggaagcaaggccctttcctgagcgcccaagtggccttcgggtcaccctccctcaaagttccagccccgagagccgcctcccgtttccagcctgcagggttggggagcctgttttctttttcttccctttccttctctctccctcctgcccccaaaattcagaatcctgcaggctctcgcctcgattctttcccccaagccccttttcgggggctgtaattagtaacgctgtttccccagcgtagccctcctcataaattatccgccgtgacaagcccgattcacggctgctacagccatcctctacctctctgcgccttgctcggctggcctgacccgggagcgcgtcccaaggcgtggggttccagaggggttttttgcttcctcccccttccaacgtctaaactgtcccagagaacgcccatttcccccactatttgtgagcgcagggtgctcgcaaagaagaggaggaaggaggaaggcaggggagggagaacggcaaggagagctccgcagggctgggagaaatgagaccaagagagactgggagagggcggcagagaagagaggggggaccgagagccgcgtccccgcggtcgcgtggatttagaaaaaggctggctttaccatgacttatgtgcagcttgcgcatccaggggtagatctggggttgggcgggcggcgccgggctcggctcgctctgcgcactcgcctgctcgctgctggcaggggcgtcctcctcggctccggacgccgtgccaaccccctctctgctgctgatgtgggtgctgccggcgtcggccgaggcgccgctggagttgcttagggagtttttcccgccgtggtggctgtcgctgccgggcgagggggccacggcggagcagggcagcggatcgggctgaggagagtgcgtggacgtggccggctggctgtacctgggctcggcgggcgccgcgctggcgctggcagcgtagctgcgggcgcgctctccggagccaaagtggccggagcccgagcggccgacgctgagatccatgccattgtagccgtagccgtacctgccggagtgcatgctcgccgagtccctgaattgctcgctcacggaactatgatctccataattatgcaactggtagtccgggccatttggatagcgaccgcaaaatgagtttacaaaataagagctcatttgttttttgatatgtgtgcttgatttgtggctcgcggtcgtttgtgcgtctatagcacccttgcacaatttatgatgaattatggaaatgactgggacatgtacttggttccctcctacgtaggcacccaaatatggggtacgacttcgaatcacgtgcttttgttgtccagtcgtaaatcctgcctgatgacctctagaggtaaactcgtgcactaataggggagttgggtggaggcgaggggggtggcgcgcgcgccccgggcgcgtgcccgccgccagttgccgccgttcagccggactcgagcgccacccgctggaggcagggctcatcgcccagcttccgaccgggggctgcaagggccggggtcgaattgaggttacagcccattatggcaaaattattgcatttccctcgcagttccattaggatgtaccaattgttaggccgtcagctgccgatcgcgcgcccggcgaggatgcagaggattggggggaggtggtgacttgcattttatttacaacaactttatttcccccgttttgcagcccctcttatttttgtgtcgaggttggggtcggtactgaccgtcctgccagcagctctgaattttgaaaatacagatatcaccttcggggaagggggaaagccatttagccaattggagaaataaatcctgcccgcagcagcagcagctacaattacggctctgtttttgcgagcgcatgagggacagtgtccctgccgctcttaaatgacaggcgtctattaaagatagcttttgtgtagtgtttctccaaggcgaggtcaaattccatacacttttataaccgtagtcgatttttctttcgtgtgaatatggttttcgtgtcattagtttgcgatttgatttgcttacgtatccagcctggaaaatcttcatcacagggtccggttcctcgagccagccgggccccaagtcggagggttctccttgaacccagcgagtgggcccaggctccctgcagccacagaggctgcctggggtctggggatccgtggggcgggttactggggtcttgcttagacctccaggagtaaaatgagggcgataatggaagcattccttggcagtgcctagtatctctgtagttattttccacggctccgaaagactcaagtaaatcacaaatatagctgagaggcaagtggagtctccccgctggaggcccggcgttgcaggcgcccctggcacgtctggaagccaggactctggcggctcccatggccctgggcccctcgttgggtcctgaacgctgctgtggcggcgacgcgggcgctatcggaggctgggagcgggaatccggagccgggagcctaccccgggctgtaatgttccacccgcgcccaggttaactcgcctcggctgaggctgcttctcttccactgacggttgcacacgcgggaccgagagactgggctctgttggggccccctttgttcctcgagcttccttcctgttctgggaggcggcttgggaggccgcgacaaggccgggctccagctcttagaccccctctttccactggccagagatgatttgatgatgcccttcgggacttactggcgagggacttaggcagagacgcccagacacgaaacggggctcggcccagggctctttcctccccagcagccccgcgtcccgaggtcggggagctcagagacactagcacaggagccccagacgcattcagggcgcaccccagaactccggagccggtttgggcatccttgtggagcgggactgggtgtgtgcagtgcgccccgctccaccgctggtattggctgtgtgtgaggttttgttttgttttgttttgttttgttttgttttgttttgttttgttttgtaagaaataaatgcacagacgcttgcaaagctccgggctcccctgaagctgcggaagcccccagatgggagcaggcggggagaaaagttggggaacaggcgagggcaagggggcaaagccgaaggaggttgcagcgctggcctggtccctgcccaggcatctactcgcccgcctttgcctctgagtcctccccgctgggctgcgtggaattgatgagcttgttttcctttttccacttcatgcggcggttctggaaccagatcttgatctggcgctcggtgaggcagagcgcgttggcgatctcgatgcggcggcgccgtgtcaggtagcggttgaagtggaactccttctccagctccagtgtctggtagcgcgtgtaggtctggcggcctcggcgcccatggctcccatacacagcacctacgagcagaaacggccgggcgccggtaagccagggcctggagggttgacccagtcagcccagtgcctcccacaagaggcacccagactagaaaccaccccgcctccactccagcctctcccactatgtctggggcccaaagcatactgaatgggagattatttcataccaagcgagatgttttccacctataacgacttggggtggacattatcgtttttgaaaaatctgcctcataggaaaaccattacaagcaaaataacagaatgagcattcttaatttgggatgcccaggtcgtgtttttgtggggatgcagggtgtgtgtgtgtgtttgtgtgtgtgtgtgtgtgtgtgtctggggtgggtggtgtggaaccatgtaagtagtgtacacactctgaattcatagtggtctctctgaggatgctactgtgaccagccatgtcggaactcaacacattttttgaagagttaaaaatggtcagccctcttgaatctttacacattctcccaaattatatgacccttctgagaaatgcagaactcccccaaggataaagtggatgttaatggaaaacattataattttaacaatccgcattaggctctgtcctagggaattcctaggagtctttgggattccctgtggagtccttggaaaccagaggctaagagatggagctataggtagtctaggatttctggcaatgtaggattgtgttgggctgtctgatctggtgccaaagttccccaagggtggtggggggtccctccaagacaggtgtatgaagctcaggcatgggctcagaagagggcagaagttggctaagagtgggcagttgagtagaagccgggggagatgagggaggagagagaaaaaaatcctgagtctggggctgtggccctccaaggctttggggagacactggaagaggccaaatggccacctctctgtacgggtttctgaagggcagaaaggagagggggttgggaagcaaagggtatttatcagtgacgcagtgcaaaaggccctctggcttgggaagctgagcagggtactcagggtgcatggacaggctgtccctccccaccagcctctctctctcttcaggctgtccctgtcacaggtctcatatacgtgccagtgcccccatcctcccctaaggtgtcagcttacatggacactggggccttgcccttcctctgccatggcctgatagccccattgggaactgattttttcttctcttttaagaagccaaagaaactttgctggttctttcatcctttctttctctctattcctctttctactctgtttcctccttctttctttcttttcctgcctcctttcccctctccctccactgtcttgggatatgtcttacccgcgcaggagttcatccgctgcatccaagggtaaaccgggctcgtgtacttccggtcggcgccttcgtcatggagtgctttgccctgcccgctgctgctgtcgggtttgtactgctgctcgggagaaaagtgcaggtagtccccggggcccctctgcttgccactgcccgagggcgaggcgccactgaggtccttatcagaatagaaacacgaggccccgtactcgtaggacgcccggttgcaggccaggaccgagttggactgttggtagaaacaaggtgaggtgtacgtcttgtccgggagactcgacgccccgtacgaggccgggaagggcctcagcgcgtcatagccagcctggtagaggggcagctggcccaagaaggagtcctggccgctgggaaggctcccggggaaagtgggattcacaaaataggaactcatttgcgcgcccctctgcaggactgtgatttgttgtgtattagtacatctggctataactattagtagtcatcgaactggtttgtttctggatggccgaacgccaaaagcgacagcagcaaatcgcaccagctgacgcggcggcggccaatgggagcgaacgccggagcccgctccccggggaccgcggcgaccgaggcagcaaagttacaaacagcccccagcccgcccgcccgccgcccgcccggcagattaatgggcgcgcacagctagccggcccggctctcttcccgaacgccagcggcgggcacggccctttcagtggcgagcagatcaggccagagtagggacactaatgcttgggccgcctcaaaggccccgccaggtcccctccttcctcctcccctttttgctttattgaattttgcgggttccccgcccctcctcctccaaacaggaaacctgaaggtcctgctccaggaggggcagtgacaaaggtggctttgctccctgccggcctgcactccaggcacggcccagagttgcccctcccctagcgctcccctattcgtgggtgcgagttcttgagctggagcaagggccatgagaaaccaggccttcactctatgctcttcactcgtgcgccttaggaatcggtgaactccctcattctctccttctccgctagcaccaggggcctgggccttgcagcccagagctgaaggatcacctcgagctgaccaggactcagccaaacgtaggttcttcccacccattccctcctcccacatacacatcctgtttgagtcccaaggggctcaatggcccgcgcctgcctggtgtcaaagcactccttccagctgggcgtccccatcccacctttgaacccagggaattgaaaggccagaaaccactggtttcaacaagaaaggaccgacagagcagtggccgtgagactgggctcctaagacagccgagggacctgctcccctgcctagcgcctggggactcagcatccactgcgagaaccgctcagagctgaggcagataaaaatccagatgtggaatctctctgtccacattccagaggcacagaagacgcagaggccctggccaagctgggcacagagggcagctctgcagggcccaaggccgcgggataattgatgggctcggtttccggggcgcccgacaaccggcactgtcctggggccgccctctttactgcccttcctgggaccgcagggagggctgccgcccctcagtcgctccggaaccgggaatagtctcaccggctccagaaatcctgaattgctttcactgctgtcccaggcctggcggtccccagacaggacattaaaagcctgtcctgagctgctcactcttgcctgagaggtgtgccttcgagatagttgacttttacaacacatggatcaatctcgttttgtaaaatgtgatagcagcccaatggcatttttacaactgtgtttgttgggcttgtaaaaccccttgaattagctttaaaatcctcaattctgtggaggttgaagaaagactatttacgtgatttggatggatttctggagactgtttacaagatctgtaaaaccctggccaatgcaggctcacccggttcaggacttagtggggaggtggcaattggcagtgttccagtaggaatctagtaatgacttagtctcttccttgcttttcaatttttttcctgaactctcctcccacaaagggaaaaaattgggaaaggactggcctaaggtcgacctccgaagagcccaagaggcactcctggaaggcggctgctagcccggcaacgggggctacccctggaagccggatgcctgttccccagtcgatccgtcctggaaagggtttactttgcatataaagcagggcctcgaatgagaggatagaattgggcatttcccacacattacttcagggaaagaattcaataggtgaaaatgaaaactcgagtcaaaaaattaaaagggacttttaaaaatagctgtttgaagaaaaacatgtttgtgttatttttttcttaaacaaaattatcagacaacagtgattttaagcaagttattatttaaaatgaaaacaaccgtttggagatgacaa

SEQ ID NO: 389 - DNA, 8060 bp, Homo sapiens
ttccattccccatctctgggcctcagtctccccttctgcagcaccaggggtaggcgtgggagacccagagtgacctcagccagggcagagcacagactgatggtgaccaagtgcccagcaactgggagaggaggacctggcctctctggggggcactcccagaaggcctcggaggtgtgagctttggggtagtgtctggacagccagcattccctgggctacaaagtcaatccagccgtggccaaggctttgtgactttgcatttattaattttccaacttgcttttgtagtcccaagctctaacagtcatatcctgaccgggcgcagtggctcacacatgtaatcccagcattttgggaggccgaggaaggcggatcacctgaggttgggagttcgagaccagcctgacaaacatggagaaactccgtgtctactaaaaatacaaaattagccgggcatggtggtgcatgcctgtaatcccagctacttgggaggctgaggcaggagaatcgcttgaacccgggaggcggaggttgcggtgagccaagatcgcaccattgcactctggccggggcaacaaaagtgaaactccatctcaaaaaaaaaaaaaaaaatgggaccagaattaaataatgcccatgtagtcaaatctttcaaccctggcaaggaagatgtataataatcatctgagtgctttgggaggctggggcaggaggattgcctgaggccaggagtttgagaacagcctgggcagcatagcaagaccccatctctgcaaaaaaaaaatgttaaagaaaattagctgggcttggtggcacgtgcctgtagtcccagctactcaggaggctgaggcaggaagattgcttgagcccaggagtttgaggctgcagtcagctatgatcgcaccactgcactacagtctgggtgacagagcaagaccctgtctcaaaaaataattatcatcatctgaggggtctttggtcggaaggggcgggcccctcatctggtgggacccctgagctggttgagaacagggtgggtgatgagctccttcacctactcctagcctgctctcacctgcccagggctaggctgggtactcctggaagatcatccccatagcctgcatgactaggggcaggtgtacagcaagcagtcaccaggtccatggaggaagtatgtcctcagcccttcctgggagaagagagcttgcaggagaggtgacccatgactcagagagggctgtacaaggtgatctttgagatcccctcccacaccaagattccatgcttctatattcctgcccgttccaggaagcctcccctgtttgccctagcctcctactcatctagcagcccaggtgatgtactatctttaataataccatttgcctaaatagtactacctgccaggccctgggtcaggacccttagggagatcatctcatttaatcctcaacaacctggtaaggtcggatcaacttcctccatattcatttttttttttgagacggagtcttgctctgttgcccaggttggagtgcagtggcacgatctcggctcactgcaacttctgcctcccgggttcaagcgattcccgtgcctcaggctcccgagtagctgggactacaggcacccaccaccacacccggctgattttttgtatttttagtagagacggggtttctccatgttggccaggctggtctcaaactcctaacctcaagtgatccacccgccttggcctcccaaagtcctgggattacaggcgtgagccaccgtgcccggccctcctaggttctgacaagcagtacagatgccacacacctggctttcttctctgaccccgggggtacctcaagtgggctccaaggaaggggacaggtgcctctaaggtgccccacttgccggcctctcagagccccacttgccggcctccctccttacccaccttggagctgggcgtcttcgcgaagctgagggcctcggtagtgagggagaagtagagcttcttgaaggaggaggacatgagggggcccttgcccttggtcctgtggatgaagagtggcccctccttcacaggtggcgcctgcaaactcagcgtccgctgcaggtccagctctgccaggccagggagggaggggaatagagagcccagggaatgagggcgggactggggggggggggcggagcagtgggcggggccatggggctcaagggctgagcaaatctgaacagcaggcagtggacgtagtcatggggctcaagggcggagcaaacatcaacagctggtggtgagcggggtgacaggtggactgaggaaggcagggccatgggcttggaggcgggacacgcgtcagtagcaggtggcggcggggctatggagctcaaggatggagcaaatgtcaacaggcacagatgatgggaggtgaggccatgggtctaggggtggggcaaacgtcaacagcaggcagtgggcagggtcacaggaagcacaaacagtggtgcgtgggtctatggcctgggggcctggcaaatgtcaacagcaggcggtgggtggggccacgagaggaacaaacagcggtgggtggggccgtggggctcaagggcggagcaaacgtcagcagtaggctgtgggcgggtctgtgcagggcggcgctcaccgtccttctcctcgatgtccacgagcttggtgatgaagtccttcagctgcgccacgccctggcgcacggtgggctgcagcggctccatccaagcctccttggccctggaagccggcgtgtccatgttgcccacgttctggactgcctggaggtgacagcaggaaggaccaggttctgctaggttaggggcctagccactgcaccccctcccaccccccctccccaagtctttgctactcagctgtagcgatggaggcagaggcgacagaggccatgcccacgggccccctccagccccactagggatcagggaggagaggatcatgaagtttgatgccttatgataactgagaccacttgggccttcctctgtaggtttaactgacgctgctgcactggataccccaccccggtgccgggcacataggtgcagcctgagagtaagcagacctgggttggaaggtcccgcgattcaccaccgacaggatgggcggccttggcaacccccgacccctcgcaggcctgttcccttatccatgagatggaactcggacaaggtggccacaggaaggctttgcaaactgtgaagtgcagtgcctacgtgggcgtgccagtggcctcgccggagccggtagggaacactctgcagtccaggccagggccccggtaggacacccagctgtgcatcccgcccgtggccgcaaggcccgcaccttggccaacaggagcagggtgcggctggtgcgggcgtccgcgtggcgctcccgcaggtggaagagcttgggcgacatgatggcgggagagaagaagcgcaggcacaggaagctggtgacggcgatgaacggtacattctggaggggtgcggaagagcgcgggctggagtcccccagaccagggctcctggcagccccctccccttaggctccgtccctgaccctcgccgggacacagcctccctggtcctccccagcgctccctggttccccaccgctcttcgcccgcccctcgccccagcccagtccaacccggcccagcctagcccagcgggtggagggcgcacctcgtgctgggcgccggggaagcgctcgcgcacgcgccggaagagctggcggaaggtggcgcgcaccacggcggggcacgcgggaaccgagcggctgagcgcgctcagcagggcccccaggtgggcgcgcagcgtctgcgcgctctgctccagcacctcggcctcggtctgcgggcggtgcagcccggaacacctgcgtggaacggggcgggttggcagaggaggtcacggtcagcgccagggccacgacaggaacagtggctctcacagcagccgggacacggacacaggggacaatacacgggtgggcagaagcacaaacacacatgctgacagggcctgatcccaacccgctgccgctgcgccccgcacccccccggagttacccccggcctcaccctacatccttaacttccactttgctggggtccagctccacgtacttctcctcaaacaccttgttgatgatggggcccaggacgccgtgcaggtactgcatcccggccacctggggaccaccgcaggtcacattgatcctgtctcccccagtcccactccagctgcccaccttctcccggcagccgcccttgcaccgtttgcctgccgtatccgcccaggagggggacaggtacacaagcagggcaaactgtttattcatgaatgaatgaatgagtgagtgaatgaatgactagaattcttagcccttgtaatcctagcactttgggaggccgaggcaggaggatcacttgaggccaggagtttgagaccagcctgggcaacatagtgagactgtctctaacttaaattttaatcacacacacattcttttggggggggggggtgcggggcacggagtctagcacggggcccaggctagagtgcagtggcgtgagctcactacaatctctggcttctggttcaagtgagtctcctgcctcagcctccccagtagctgggatcacaggtgcccaccaccatgccaggctaatttttgtatttttagtagagatggggtttcgccatgttggccaggctggtctcgaactcctgaccttaagtgatccgcccgcctcagcctcccaaagtgctggaattacaggcatgagccactatgcccagccacattcttaaccttaaagggctctcaatatggagatagaacactggagtcgaagtcccagccccctctgtcgctctctctgaagctcagtgttgtcatttgcaagatgaggacaatatagcatgcaacctcaccttcagaaaagactccatggactttgaggccagagagttgctccggaacagggtgttggtcttttgttacttggtcataagtaggcgttttccttttgatttggttctaggaggttagtgtgcattggcgttctgttgcctgcttccagcccctattctcctgcctcaggttcattagaaaagactgagtttggggccgggcagggtggctcacacctgtaatcccagtactttgggaggccaaggtgggcagatcacgaggtcaagagatcgagaccatcctggccaacatggtgaaaccctatctctactaaaaatacaaaaattatctgggcatggtggcacgtgcctgtagtcccagctactcaggaggctgaggcaggagaattacttgaacttgggaggcagaggtttcagtgagccgagttcgtggtcactgcactccagcctggctacagagtgagattccatctcaaaaaaaaaaaaaaaaaaaagaatgagtctggcccctttttgtctttctctcatcctctttgcctttcaccatgttatgatgcagcaagaagcccctcatcagatactagtgccatgaccttggacttcccagcctccagaactgtgagaaaataaatttctgttctatgtaaattacatagtctgtggtactttgttatagcagcacaaaacaaacaagacaacaagcaacaatcatgtgaacagaaagaaaaatgggcataacaaatgaaccatgtttttgtccaaattaggttcacaagcccttatctgcaccatccagactcaaacaccttaagattttggtagttcatttggtagcaaaaactgaccttaattgtcatgaggatatttagagtcgtcttatattccacttagctgattattcacacatatcacacacttagctgattattcacacatatcacagcaaaagcatgaacatgtctgattaccagttcctgtccagatcctgtgataagggcttacccaggacatacatggtataacttttctgaaatcttagattgaattccaaagcacatctggacttaagggattgtggatatatacatatatatactatatgtatatatatacacatatgcatatatatacatatgtgtatatatatacatgtgcatatatacatatacatatgcatatataatatatgtatacatatacatatgcatatatatacatatgcatatatacatatacatatgcatatatacatatgcacatatacatatacatatgcacatatatacatatgcatatatacatatgcatatatacatatatgtatacctatacctatgcatatatatacatatatgtatacctatacctatgcatatatatacatatatgtatacctatacctatgcatatatatacatatatgtatacctatacctatgcatatatatacatatatatgtatacctatacctatgcatatatatacatatatgtatacctatacctatgcatatatatacatatatgtatacctatatctatgcatatatatacatatatgtatacctatacctatgcatatatacatatatgtatacctatacatatgcatatatatacatatatgtatacatatatacacacatagtatatatacatatacactatgtgtgtgtgtatatatatacacatatatatactatgtgtgtgtatatatgtatatatatactatactttttttgagacagagtcccgccctgtagcccaggctggagtgcagtggcgctatgtcggctcagtgcaagctctgcctccctggttcacgccattctcctgcctcagcctcccgagtagctgggactacaggcgcacgccgccacgcctggctaattttttgttttagtagagacggggtttcatcgtattagccaggatggtgtcgatctcgtgaccccttgattcgtccacctcggcctcccaaagtgctgggattacaggcgtgagccaccgtgcccggcaggatttatattttaaggaggcaggggagttattctccatgggaggaaataagccgtgagctgccttgcgctttggcatgtttctctatcatacagataagaagctagttcagtcaagtgtatgcagatttgtggatggaaaaactggtgctcccaggaggaggggagcagattgaggaattactgacaccttctaggggcgaccagccagatgtgcaggtgaagcacaagacaggttctcttcatgcctccactatcctggcctcgaccaaactgcagagggaaaaactcaggtgagagtgagaaagcacagtcactttcagttaggtttgtagcggtgtgatcgtcacttagcactcatttattcgtgtattcatacatttatgcatgtttctttcacagatcaaactgttgagggtccacaaacaggctgaagacctcgtctggagggagactgcagtgaacccaagatcgttcaaataagcgcatcgacataacaagatttagaaaagaataagcacggtgctgtgagagcagctagcgggggctggactgggtccctgcggccaggcttccaagtcgagctgccgtttgggtgggaccagaagacgggctagtctgcgccccaggatccctccctgaggacaaacagaaggccgggtcctcccttctcccgcttgtccttcggcattcgcgggacctgcatgctagaccagctggccggacagctcgctaggacccgcgggtgcggctggcccctaccatttccgcttcctgccgtggggcggggtttccggttgtcggaggcgaggcttgtcggctgtcaaaggggcggcccggcccggcccggaagctacagcagcggcgcggagactgcggggcgggccatggcggcgaacctgagccggaacgggccagcgctgcaagaggcctacgtgcgggtggtcaccgagaagtccccgaccgactggtgggcggcgagacgggccagggtcgggccaggggctgcctcaggggtgggtctgtctggggcgagcgggggactcggggggagcgggagcgcga

SEQ ID NO: 390 - DNA, 8060 bp, Homo sapiens
tggacactgggcatagatttctcaagaaggaagactcccctgcctccccagggcctctgctctcctgggagacaaagcaataataaaaggaagtgtttgtaatcccagcactttgggaggccgaggtgggcggatcacgaggtcaggagatggagaccatcctggctaacacggtgaaaccccttatctatgcgcctgtagtcccagctacccaggaggctgaagcaggataatcgcttgaacccgggcggcggagattgcagtgagccgaggtcatgccactgcactgcagcctgggcgacagagcgagattctgcctcaaaaataaacaaataaattttaaaaataaataaataataaaaggaagtgttagacaatgtaatgccagtactacttcctaggaggaaaatcatgagtgcctgtgggcacagtgtctggaggggtggataacgcaggccaggaggggctgctgaggagcagatgattgagcaggagacctaaacagagtggggcttgagcaaggcagaacagcagtgccaaggccctggggcagcgccagcaggtgctctgggaggccaagggctggatcagagggtgggtgggtagaggggtaaatctgagggtcaagagggtgggtagtgttggggagtgtgaagtctgagtagagggatgtggttggaggtctttaaggagtgctgtgacccgccctgggtggaaaataagtattctggctgctgccagaagaagggtcttgtcttttgggtggatggtgggggtggtagagggtagcagggagaggtgagaactggggaaggaactgactccaggtgtttctgatctccgtccgaaagcattcgggagcacccatcccaacacagccatgcttggtgagtaccacacctgccccaaaagaacattgaaaagaattttttttatttgaggcagagcctcactctgttgcccaggctggagtgcaatgaccttgtctcggctcactgcaacctctgcctcccagattcaagccattatcctgcctcaccctcccaagtagccaggggtcaacaagtgtgcaccaccatgcctggctagtttttgtatttttagtagagacggggtttcaccatattggccaggcaggtctccaactcctgacctcaggtgatccacccgccttggcctcccaaagtttgggattacaggtgtgagccacgtgtctggccgaaaagaattaaaggtgaaatcagccacattttccagcaaagtttacactattacaaaaaatacaaaaattagccaagcctcgtggcccatgcctgtggtcccagctactcaggaggctgtggtgggaggatcacctgaagtgaggagtttgagaccagcccagccaacatggtgaaactaaaactggtctaaactaaaacacggtctctactaaaactacaaaaattagccgggcgtggtggtcggcacctgtaatcccagctacttgggaggctgaggcaggagaattgattgaacctgggaggttgcagtgaattgagatcataccactgcactccagcctgtgcgacagagccactctgtcttaagaaaaaaaaaaaagcaagcattttgtgctcactagaaatattagcatgattgaatgcttccttgcatatgaaaattattttaacattgtaaaacatctatttggcaggcatggcggctcaacacctgcaatcacagcactttggcaggaagagcgggtaggatcgcttgagttcaggagtttgagaatagcctgggcaacatagtgagatcccgtctctgcaaaaacaacaactgagtccagggaggtcgaggctgcagtgaaagaagattgctccactgcactctagcctgggcaacagagcaagaccctgtctggaaaaatatatacatgtatttgaggacctggctctctcaggacagttttttttcttttctaattctaggttttagtggctgtcataaaaatatgggaggtgaacagaaggtagacaccattagctggccttactaaatcatcatactcattgttacattccatccaccaaatatgcaaaggttttggtaaaatccagctagtgtatttctatcttcccagttgtcagtgggttagaaagttcctctttctaaccaatgtggaggtgctgcatgtttaggttttacatgagtgctcacacccaaggacttctatattttaaaagtgaagacattttaaaaacagattattctggccaggagttgtggctcatgcttgtaatcccagccttttgggaggccgagacaggcagatcacttgaggtcagaagtttgagaccagcctggccatcatggtgaaatcctgtctctactaaaaatacaaaaattagccaggtgtggtggcaggcactcgtaatcctagctactcaggaggctgagacaagagaatcgcttgaatccgggaggcagaggttgcagtgagccgagatcgcaccattgcactccagcctgggtgacgagagtgaaactccatcccaagaagaagaagaagaaggaagaagaagaaggaagaagaagaagaagaagaagaagaagaagaagaagaaggaggaggaggaggaggaggaggaggaggaggaggaggaggaggaggaggaaaagaagaagaggaggaggaagaggaagaggaggaggaagaagaggaagaagaagaagaggaggaagaggaagaggaagaagaggaagaagaagaagaagaaaaagaagaagaagaagaggaaaaagattattctgaaattaggtcattctgttctcaagcttccttttcctgtgtaggtatgagtgtttatgagtctaatacattgtttaccccaaaatcaagtgtcaaataaatattttcaaacttctgctcaaaaatttgctctttccttagcaagagttttgttttgtttgagacagagtttcgctcttattgcccaggctggagtgcaatggcgcgatctcggctcactgcaacatctgcctcccgggttcaagcaattctcctgcctcagcctcctgagtagctgcgattacaggcacccgccaccacgcccagctaagttttggtatttttagtacccaaagttgatgagtcgacctgctccacgcgtaatttcaaggtggtcacgttggggtcaccccttgcagcttgtagctgctgtgaacgccagagaatgaagtactcagacaattccagctgagtggggcaggcggcaactcctctgagagagtgccgccccaaaatccatccgccaagtatttattagaaggcttgttaaaccacaaacatccaccagatgggtttttgccgtggggtcatgaggcacatacggccttgtaaaagcactcagaccacattcctaggaggctgttttcagcgctccttatcacacattccactccttgtcctgttttcagtgtcaaggagttacattctcacgcacaaacaacgtacacacagtgcctcagtatttttccatgcctcgagctcaaatgccttgtacataagtttgaatatatcgtcgtgcaccccccacatctcccccttctttaattcttagagcttgctggttatccaacgcaaaataagcttctatccttcttccctggtcatagatgcttcgggtggcagcacagagccatttacagaagcctagcaatcagatacaaaaaagaatatagcggccatcaccctagcaatcagatacaaaaaagaatatagcggccatcacccaaatgcgtatgtttaacccagacaaccaagtattcgggttcagtcattgaaagccttcttgtaattgctgaagggtatttgtttgtaattgctgcgagaccattcttcaagttgtttcttcaactagacctcaaatgctttgtacataagcttgaatatattgccgcgcaccccacccgctccccactgcctgccagagggctgggaaatggctgcaccgctgaacaccgcagttaccccggggaaattacttatgacctcctcccgcgcgctgccactgtgcgctccctcccctcccctgctttcccttcctctcctctcgcgcaccctcctcccgccctcagggacccctgggcaaggccactgcgccccgggtctacggcagctggcggggcgctcaacgcgcgcactcacacggacgacgtagcgcaaagagttcctgtcgtccaggctgaccataagcgagaagagcgcggcggcgctgtacacgccctgcacttttttacagcagccagttgaggtcccatcgcgcagcaaccccccggcgctccgccgcgccgcgcaggtcccagcccccgcagtcctcgatgacctccagcatgagcagcgggttcagtcgttcgatctcgcgcatctcgaggcacaagcggaagaaggagcgcacctagtgctgggcagcgccgccgggtccacccttgggccgagccagcaggcgccgcaggcgctcctcgttctgctagccgatggccgcgatggtgccgtaggtgagcttgtcgtcggggatggcatggcgccgcagccagccgccgcaggcgaacgagtataagtcctggcatgggtcgatgctggcgtccaggttggcggccaagaagcgagcggtgcacgcgaagtcttgcgctcaggacagccttcaggacaggctccgccgccggccgcgaccgggcccaggtacttgagcaccagcatagccgccaggatggagcagaggccggctgcaaacaccagcccgacagcaggttcaacttgcgccgcttccagagctgcagcccggcctgggcccggtggcctgcgggcagaaagtccccgcaagcgccccccgcgccgcagtgactcacatacttgacctcctggaactcatcgtagtgcgccatcagcgaataccaggactccatggcgccgaggccgccggggtgcagccctgggccacctgggctacgggatgcgcgtggccgccggcctcctcgtgagcctccgcgtggcccctggggcctcagctgcgggaaggacagaggcaggctaatgagacgccgcagcccgacggggttccggggcaccgcgaggagagacacaggcctgggtgcagaggccccagccgcgagcctcattcactggggaaaccagggaccaggagggctcggcggggccaccacccccgcgtgcacagtggagtcttctcccctgtccccctccctgcacacacgtgcgggtccctgggttgggagggccctgatgggaagggggaggagccaggcacggggcctggcacgtagtgggccttcattgaaaggctgtccctcttcccttcgcctttctggtccaggacctgccccagccaaggccgggcagaatgggggtggggggtggagaagcggaggctggagtgaggaggtggggtcaggagcgcgtctatgctgcactttccgctttccgcgctggacacagacagaggctccacaaagcggccaaagaaccaaactttgtccttgcggaagtccgcaggatctaccactcaaccccgatcgctggctccttctactcggtggcccgacagcccacccgctccttccccaggggcgagcgccaacgccccagggtcgtggatacacagcccaccccctggacggccctgatggagaccggctccgtccccccacccacccccattcccagtctgtgaccccgacccgagccactcccggcttcaatacgttctccccagaacccaaacttgggtgaagtttcacctcccgcggggcgcaaggagacgaagccgggaggctccgcgcagcggccgcgatggcggcaacggctgcagggattcggcgccatttaccccgcaggtgcgcactcgagcaggaccaggactagcgggcccgctcgaaaccagagcctgagcctgagcagaactgcgtgggcagccgctgtctcccagcgcccgctgccttttctgccgccgagctgccagcccgaggggtccagccgtgtcccaggaccagtaagggcagcgggtactcccgggaggggtcccttcggatcccgcgtccccattacgagctgcccaccagccggctagaaaggggctggagctacgcagctgggggccgtcatgccccagcccacagccctggagcaccggccggggaggactcctcctaaaggataagggggccctgatggagtgcctgggctgcccgcacagcgcctgcgcaccttcaccagggagcttccttgtactcctgggaacgcctgtccaggatgaggtctccccagggcgtctgggcttctggttggcctcgctcacttcccccagttcctgatccagggagagcaacggagagccctgccagaagaaggcttggggctgcgagtgcggcccccatggtaccaatgcacagttgacccagagcacagcaatcgcggccaataggaggtgacttgggtttagcctgtgaccacacagtcctggtcaccctgcacagactgccaataaagaggggtccgaggcccagctccttggctcccctgcagtgtctccaaaagggaagctgaggctgtgggtgagtgggtgatgccagtggtccaggcccagttccaccttgcacaaaggccttcttaacctttcatcgaaaaatatttctgcaaggacatctgcccagcaaccacccgtccatcctcagactggtgccacgcatatccttgatccttgtagccaaggataaatatctcaaaacaatcctgtgatcctcctccattttcctttaaaaacctttgtcttccttcacctccctaaattcacacgtgctttcctatggcctgcttattcccaagcaatacctatttccaaagaaagttcattttattttagagtctttctgtatttgttatgcagtgtcacatagcggagccagaagtgggaccgaagtgaattcatcttggatgaatcagcgtgtcctggaatctaacgcagtgttgactgagccccccgcagactgcctttccaggagttgcttttctgttctggtgaatctcctcaaatacccagattccctccctttggtcagttcctttttactttatcctggatgtgatttgattataaggctcccttaaacaaaggaccttgcatccctcctgagggtataaaggttgggtttctttctttctttctttctttctttctttctttctttctttctttctttctttctttctttcttttttttgcttctttgcttttggcaagcactttctggtgtaaagagcagtgcccttctggtttgaggactctgagttctaaagaatttatgttctgtccatgaggcaagtctttcctggtgaattcacttttggttctggatgcctgactgaatattatgtttgatgtgtacaccttggttgaaattttgtgagcattctgatttgggtttgattttggtttggtttcccacgtctttaaatgatttggctcatttttttttcttgcttgttcctgaacatcttctgatcatcccacagcaaaaataaacataaatagtttagcaccataggaaatgttaaaacacacgtacacacggtgagggtcggcccctcgaggtggctcctgtctgtaatccctgcactctgggaggccaaggtgagagaatggcttgagctaaggagttggagaccagcctgggcaacatgatgaaaccccacctctacaaataacacaaaaattagctgggtgtggcagctcccacctgtagtcccagctatcaggaggctgatgtgggaggattgcttgagcccaggaggtcgaggctaccatgacttgtggtcctgccactgcactaaagcctgtttaacagtgagaattgtctcaaaaaatacacatatggtgagtgtgagaaagccaactgaaagaacccagggtgtcaccaccatctaaaacactggtccagactcctgacagtccctgacagggtttataggattttctttgcttctcagagatgaaaaagaa

SEQ ID NO: 391 - DNA, 8060 bp, Homo sapiens
tcgctctgaagttgcctgcttatatccaacttgaggttaatctaattattccaagttctactggagaaaaggatgtaaatgtagggactatctccattatatgtggattatttcccacctttgtgggctctcatgcaagcaccaagccccttggcagctggtccagtttatactcattttttttgtttatttatttatttatttatttatttttttttttttttttaagaaggagtttcactcttgttgcctggagtgcaatggtgcaatcttggattgctgcaacctccaccttccggattcaagcaattctcctgcttctgcctcccaagtagctgtgattacaggcatgcactaccatgccaagctaattttgtatttttagtagcagcaaggttttacgatgttggtcaggattctattgaactcctgacctcaggagatccacccacctcggcctcccaaagtggtgggattacaggtatgagccacctcacctggccctctactctcttgatacccctctcactacctctttgcatctttcaaaaaattaccttgcttccaagaggacctctgttgacaccaatagactgggctatttacagtgttctctcacttgttttttagacttcaacaatttacctactctatccgtgcatctagattcaccttattcttttctaaaagtatgtagtatgttacggtagtacaagttgagtaccccttatccaaaatgcttgggatcagatgcgtttccaatttcagattttttttcctttggattttggaatatttgcattatacttcctggttgagcatccctaatctgaaaatccgaaatccaaaatgctccagtaagcatctcctttcagcatcatgttggtgctcagaaagtttcagattttggagcatttcggattttggatttttggattagggatgctcaacttgtactatattttaaccattctaccaatgcagtggttgtttaaaagattctccctactaatggctttgtaattgttaaatacagtggctgttttccatcttggtatccgacttgctgtccctgtaacatctgacacttctgatgacctcttgaccccgcccctcctgctcaacaatgctctattcccaaggcacccaccatgctgcctgccctcccacccttcaaagttctttctcggttccttcaaccagcttctcccccacaggcagcctcttatatttgggactttccaggcttccatccttaacagttgctttaattgttttttccatattcactgagcactcccgaacattacatattattctttttgctgatgacttccaaatctctccaatcactctccagaattccaaatgtgaatttcaaattgcctacagtgcaggccaacctgtgggccttacaggcactacaaactcaatttgtccagaatgaacttaatgattgccctttttgcgttttagtccccctcccatccatcacaccgctaggcttgcccctcctcctggggcaactggaatggtttttgtaaaagcataaatcggatacaatgattcttttgcatttggtatgcgggtctctgcctgcagtccacatggctactcctgtgtacccttcagatcttggctcaaaggtcaccgcagagaggctgccctgaccacctgagcaaaagcatcactccccccttctcctccaattaccctctatcctgttaccctcctcctattgcacatatctctatttgaaattttctctatttgtttacacactgcttgcctatgtcttctctagaacgcaagctcatgaagacaaggcctttgtcttttgcaccccagagcctacagcacctcctacaacccagcaggacaataaacgtgtggaatgaataaatcaactcctcatcctttcagaaggaaaggtcctgctgttaaattaagcactgagccccacatttcaacctgacccttctgtctgaatgtgacacgtttccctccccagcccacttactttagttcaggccattcatattcataaacagattatctgtgaatgacaagctgatccctggaaagagatggcaagttagccccacccaccatcctcaccaccattgagtttcacactgaacctgacacaagttataaccaccaccttctaggaaaaccacttctcagggagcagggaggacgtggccacaaggtcaagaacgggttggatcctagcacactgagagatgggtaccctctggctgacaccgtcaggattctcagggttaatgaggctcagttctgggaaaccagcaccccacaccctcccatccggacacactgctagatattttacatgcatcctcccaattggctccagagcccagcttgctgttgctcccttttacagacaagccataggtcactcaggagccgccagcgtgtcctagagctcctgcagaggcctccactgccagagagcccccaacctgggtaccaaaggcttcaaatctcaagctctgtccacttgagctactttatttcctagctgccttcaaaacccctcagtgtgctttttaaaaacaaaacttgaagcccgccctggaggagtcaagaggagacccaggaagaaggaggcctccagagcagcacgcgggggtctctggggccctgccgggctcgcagaagcgactccccgtggctcgcggggatggggacggctgggcgccggcgggacgctgcaggagcgagctaccggccggaggacacggggggacgctgggaactcggggtgaagggacgggactcagagtttcgtcagattgggggcggggagaggaggcccgggtccgaggatggaagcgatccccgccgggagggagaacaaagcggtggccctctctctcccccgacgcacggcaagcatttaatctacaagcagggtgccagggagggaggggagcgggccgagccccaaaatagggagtttgcatttaccacgacgcctcgcccgtagtctggcgcctcctcgctgctcccggccatgtttctcccggggaacgcgggaagggaagacggcgcgggaaggagcagggagggcgaaggctgcgtgggggatgggacgtggggatggggacggggacggggacggggacggggacggggacgggtccgccccgccccgggcccgccggcgggaagcagcggcctgacgcggatccatggccccggcgctgcgccccctcccctggctaggccgcgggggcgcggggagcagctgccaagccgctaccgctccccctgagcgcgggccccggacgcgtcccttgcggccgccgctgtcgccgccgccccctgccggatggtcgcgtgcagcccccggccccgccgccaagccccgcggggactctggagcaggaagcccgcggcaggaagagaacgtgtcccccaggcccctgattcccagatccaccgtcccagccctcgggctaacaatctccttgactcctccctgccagatttcatgcacgcgattgtcccaagcagaagcgtgaaagagcctgtgagccagcgtgctcttggaggatgggaagtgtcctggatgtgttttcaaaccttggagccgccacccacctctctccacctccgctcatctccctccacctcccctcacctccctccacctcccctcacctccctccatcttcctccacctttctccaccttcccccacctccctcatcccagggcctggagctggaaagattacacccgattgcttttagggtggcccggatctgcagtgatcagatctgggctttgaggatccagcctttcggcctttcgtcaactgcattcaggggaggagggggagagatttttacacattctctgctttaccagttttgcaagaacatctggtcagattgtaattgttccaggttgcagctttactaaagcaatcgctcttttctgattagaaatccttcttgtatgagtctgttgttcatttcaacccctctcacatgcctatgctccggttctttgtccactcctgtaggttcctgctttttctgggtgtgtcttcattccccaggtccctgacatctcaccagcgtcttcattcactcagcccaattcgggtcgaagccctgaatccaagagaacttaacacagttttcctgatgcaggcgtcttttgttcatcttcgaattctggcacacagaggggagaggaatgctgattttgcctagtttaaaggggaaatagttatcaatcggttaatgacgttctaggttggaaaaatattagtcattcagacttggcgccctggtcctgctcagcagggctggctcttcatgtcgtttctaagcgccagcgccttggagggtgcagctccagagatccctgaaatcaggcatctgcttggcaactgccttacagaaatggggggtgttgtttctcagcacacgggtaaacattttctcctagtaattgtgagagggcgttgttttgagccatttttgtagtctgcatctcacttcttttccccaaagtcaagcaccatcttttattttcattttcaaagaccaggcccaggaaccatattcacaagcaacatcattaaaatttccaggagcagaaaagtgctatcattaggatgatgatcaaactttagagttcacaagactctcctggggagctggttaatgcagcttcactgggtggggaagatctgtggaagcacctagaatcctgtacctgctgagagacaccagatgggtgtgatgtgggtggctcatgacccatgctttaggggattccactagaccatcttactgcttggatatcaaaacttagccatgaggctcagtgtgggtgcagggccagattggggggtaccaggaacttcaaaatatgtcacaggagtagttgccatacagaagtcaaaaagcatcaactttggttccagcctagacactgcggaagatgtaagggaaatggtagataaatcttcttcccttagaaaggctattagtttaaacgtaaaatccaacaagttcacagtgaaaaatgtaacttgcttgaaagacaacaggaatcttatgaatgtgtgctcaagaacatcctacatagacttatataggtcatcctataaagggcacagaatgatgagtaaatagtttttaaaaatctaattcattttattatctttgtatattttgataatactttgtgcggtctgattacacttcgatactttggagagcattaacataatacaaaataatacttgataacccaaatagtatttgcaaagaccggtatccagaaataacagctcatctgtccaaggctttattcttaatcttgcattatgaggatttagaggcaaaaattctttttaaacctcaaatttctgttacatgttgtattagtctgttctcatattggtataaagaactaccttagacctggataatttatgaagaaaagaggtttaattgactcacagttctgcaggctgtacagaaagcaaggctgggaggcctcaggaaatttacaatcatggcagaaggcaaaggggaagcaagcacgtcttaccatggcagagcaggagagagagagagcaagggtgtagtgccacatacttttaaaccatcagatcttgtgagaactcactcactataacgagaacaatatgggagaaatccacccccatgagccaatcacctcccaccagatccctcccccaacactgggaattacaattcaacatgagatttgggtggggacacagagccaaaccatatcacatgtctagtggaatagctttggactaggacctctatttttctgtaacaatccatgttactttagccaatgagtctaagccaattatatcagtgtaatatacatcaattttctcatccataaaatggagccacccatttattctctactgcatatgatgatgagatgaatgtgagataacatgcaagagaattctttgcaaaatgctataaaactgtaagatattattaacctgacatgctgtaaaaatgtatgaccaaatgtttgtaaaattattccatgtgaaaatgacaaggaattgtcttttaaggttgatggggctaggcaccatggctcacacctgtaataccagcacttcgggaggccaaagcaggaggctcacttgaggccaggaattcaagaccaaacctgggtaacattgtaagaccacatcactataaaaaattaaaaacttagccaggtgtggtagcgtggcacctgtagacctagctactggggaggctgagctggaaagattgcttgaggccagaagtttgaggctgcattgagtcataattgcaccactgcactccagcctgggtgacagagcaagaccctgtccctacaaacaaataataataataataataaaagattgacgtaaggtgaccaatcagggatagttatagtccagggatagtctagagctggtatgagaatgaatacagaaaaatgataaaattattaaaataatgagatttttcataaaaagggatattttagctcagactgtccatttccttttctttttttttcctttccaacttttatttgaggtttgggggtacacacgcaggtttgtttgggaaaattgcatgtcgcaggggttaggtgtacagattatttcatcacccaggtaataaccatagcacctgatacatagttttttgatccttaccctcctcccgccctccaccctcaagtaggccctggtcagactgtccattttctaatatacctttgaaagagctataagaataaagatgtgcatctttgcaaagttaataaccagtcaatatacttgtatttttctatcattctctttattacattttagcagtagtttctctgcattttatttattttttttttttggtgtttatattgtgtttacttacttttttttttagttttatttttaactgacacataatagttatacatattatctatggggtacagtgtgatattccactacatgtatacattgcataatgatcaactcagggtaattagcatactcatcatctcaagcatttttcttttctttgtggtgagaacattcaaaattgtctcttctagctgatttgaaatatacaacacattattgttaaatatatcattctgctgtgccatacagcaggtgtccccaactaccgggctgcaaactggtaccagcctgtggcctgttaggaactgagctgcactgtaggaggtgagtgtcagcgagcattcccacctgagctctgcccctgtcagatcagcagccgcattcgattctcacaggagcacaaaccctatggtgaaccgcacatgggagggatctaggttgcatgctccttctgtgaacctaactaatgccggatgatctgagatggaacagtttcatcctgaaaccatcccccctcaaaatccgtggaaaaattgtcttgcacaaaacaggtctttggtgccaaaaaggttgagactactgcgttagtgtaccagaacttattcctctcatctaactataacctagtacctactaaccaacttctcctactcctgccactcctccccacctttcacctgactctgctaaccagtattctagtctctacttctatgtgatcaactttttaaaattccacatataagtgagatcatgtcgtatttgccttttgtttctggcttttcttgcttaacataatgtcctccaggttcatccatgttgttgcaaatgacaggatttcattctttttgttgaggtcttatccaaaaaatccttgcctggaccaatgtcatgaagtgtttccactatgttttttttctagcagtttcatcatctcaggttttacatggcagtctttattttgagttgatgtttgtttgtttgtttgtttgtttgtttgttttgagacggagtcttgctctgttgcccaggctggagtgcagtggttttatctcggctcactgcaacctccgcatctcagattcaggtgattgtc

SEQ ID NO: 392 - DNA, 8060 bp, Homo sapiens
atgaattaattttagttattttaactaaaactgggcagtttattcctactactagattgctcaaagagcaaccaaatgtaattgaagccaagcaattcacactatttatagacatttttcagaatcacctgctttgtagtgatttttttcagcagttgtaaagttttgatttttaagagtccctttgaagacgtggcagatgttggctttgctaataatgctggaaagcgtagcaggttcaaagttacaaaaatgtttaacacatataaaatataatggtgtgtttttctattaaatttggttattttcaattgtcaataaacttacataaaggaagcctaaagtccataaatatttgcttccaaaacatgaagctgctagagtttgcatatgtgtgtgtccatgtgcatttgtggagggaaagtgcataaaatatatgctagagaagcttacgtattatagttttaaatcgttactatgaataaaattgtaaggtttataaatatttaagctgtttttcaatactttctggtgcttaaaattctattagaatttaacacggtaattagaattagcacatacacatacagtctaagtattagatgcagggatacagaattttggtcctgactttaccctggatttatgtactgaattttctctcaaccataaatgcaaagtaattataaactacctaacaaaatacaaatgatctcactatataggatgacatttttatctaatacaattttaaatttcaggagttccgaaatcacttcaattttatattttagaaatattgaaatactaaaatgtgctataagcaatgagagatatacgtattaatagcataccaggatcataatcattttcaatattgttttagtttgtgctagatcaagatgtctatgaaataaaatatctttgaagataatttatggaacacctaatgcaattgttacacgagaaagatatctttaatttaaatctatctcaatatctgacaaatataccttcagctgaaattggcaaataaaattttattttcaataagtgtacatagatttaaacagaaactattgtgattttccttttagtcaatatttcttcaacatatcaaaggaaagaaaagctcattctaaatccccagtatttttatccttggtgatgactaattgtactttccactgaagttttaatctgttaataatttatgtagctgacacaaacacttatatttgcttgtttttccagtaccctcattatcagcttcaaaatgtagaaatgaatttaattttgttaaatggttatttcccactaagttgggggggagagataaattagttttgttaaattattccattttttaaaaaaattattaaaataaattaagggaatcagttattgaattccgttttctcagttttccccaaacaaaataacatgtgcttgtatgaaaattgtttgccctgagaaacttaagggcaatggctcagttcaggaagcatgaagaacaatctatcatgtaggtttctcattgcaagaaataaaatgaaccgtaagagcttatgggaattgcaagagtacgctcatcaacccgaactgggatctgcttccaaagttacactgatatcaaatgttcagtttatgaaattgtcactgcattctaaaatcgactgtttttctaataaaaattgaaacctttttgctatgattaacctttcaactcactatctaaagagagtttcacttatagttaggaaaatacattaaatatcagtgacactactggtaattttcttataaaaactaatttgtgatggaacattaaaagttcaccccctgaccttggaaaataaaagttagcttttgagaccgtgagagaagaatccatcctatagtaacgctgaagaacaattgatattgctgtgaatggtgaaggaatattaaatatgcggccaatcattttcatttatgtggcatcttacctaaagctttacacacgatcaacatttttccaatccttcaaaccaacatatgggattaccttctaggactattattaacccaattccacagaggaagaaaaatatgcaaatattatattaaacaaatgacaccttccaaaagtatttaatccaggttgcactatacccacgaaagaaaactcacaagtctcttaattttaaagtatcttttaacaattttataaaaatacaggtaggtaagagctttgaaaacttgtctggaaactttgagtttctctggattgctacaatttattcggcacgttgtgccttcaagcaccagaggtcaggaaggttccccttttgcatggctgctcaaattatccccactgaaatcagcgcctcctgcgcgcacccttgcatacccctttagacacgtatctaactaacagtacccgagttgctgttgcttcgcagtatttgtctctactaatacccacttggtagagggatttattttccacttttgaaacttaggttctgtaattagcttacaccacatggacatgtactattaaggttcgtctttcttccagtgtgagcatctatttatttacaattctctgacacattccttaaaatctgaattcctagataatgtcttcttccccaataaagggaaaattttaccatttgaaatagggtgctatttaaagaacgctgaaataagaatgttaaaaaaaaaaaactgaaacttttttttctcatgcgctctgccaagttccattgcaagttccaaacattgtgcaataatttggaaatccagttaacgatgggaaaaatcgagccactcagagtcggcaacttgcaagagaaaagtcaagaagcggcacccgcacgcacgcctgcccaacggacgctgcatccctgggcgcacgcccctccctccccagcgctgggatggaaggtcacgcttcacaatcgatttcacagccacttgtccttttttatcaaccttctggtaaactagtttaggactttggagggcttagagctgctggctgtatacgcattgctctcgaataaacacgtgtccccaaatatcaggaccaaagcttcaccgccgaatttggccgcaggaagccacagagggcaacacattcccatcttccctgctgccaccctccagtgcgagaatctcccctagtatctctccgccccttttccagcccggcgcgcactctcgagggtgcctggcgcgcccttacctgagctgtcgcttttcctcttgccgccgcttcgcttctccgcctccgcaggtgacagtgcctggcggccgtagtcccccggcgcgcacgcggccccagtcggggtgctggagcccaagctggaagagttggagcacaggacgggcgggctgctccccaactctgggggccctccagagtcgggctggaggcagaggctgtgccgagccgcactcggtggggaagacatctgcgggaggtgccagttggtttgcagagcctggtgctgctgctgctgatggtggtgatggtggtggtggtggtggtggtggtggtgccccctgtgatgctggctggcaaacatgccctcttcgttggggtatcccgcgattatgcaagatgaggaagaagtagagagctcggggtaagacatatggtcagatcttccatggagggcgagagaggattgggagaacgggtgcaagccttgcgccgtggcgtgagggctgcgcaggcagccaaagagcgggtgttccatagcatgcaagtttcgggttccaggcagaagacttcacggcggttccaaaggccaccaccctctgtcactttttcactggaaaccgtgtgattttttttttaacctcccaaagcaatagcggtgcacttctgcagagctcggataatcccggtcctgagccccagcggccagtctcctttacatatgaacagtcggacctggaagagcttccctgagctactcagatgtcaagagtgggagaggttgaagccaaaagaaggtggtcccagagaactgctttcagggggaaatggctctgagaagttataaatagagtgtaacgtgagctgggggctggcttaggagcccagagttgaccacatgcaaactccctccaaaactcccgctcagcctgcgccacgcgctcccagttccacttcctatctcctgctggacggacgtagagcgtccacgcccgcccagcactgccggctgccaggactacaagcggcacgccaacgtctaagtcccgcccgggagggcagcagctctgccctccagactctggaggcctgggcgcggcgcacaccacccccaacctagcaccctgattcctacctactcactttcctctcggggaaacgtgacttgtcagtgtcatttgggaactgtcacctgcagaaaagctagggatacgcctatcctttcaggaacacgaaagaagtaatagggttaaaggaaaagaccagagctagtttggcgcaccctcgaagtttttcaaactttgcatcttcccgtgccccgggcgccgcagcgcgcctaggttttcgcagctggtttctgtcggtgggttgttaataggctgggacgccagatctgaggttgcggggatgagcaccatggcctggaaaaggcggttctcagtgcagaaagaagacggacctggttgggtgggtgggaggaaggcgtgagtctgaaagggttgcagatgcctgctccctggcatcctcacgtgcgatgccaggtggaggctcccttccccctctttcccggtcccgctcaatttcctagccacttgtccaccaagaagaacttttcctgggtcaagaatatttccaagcgattgtgtcccggtcatatgagatgtgtagattgcacgcgcatttctagcctttcccctcaggagctagcccagatctcctcggtttcctccagaaatccactctcttctgctcaaaaataaatccgctaatgcattccttaccaccagggttccatttactgagaattcttacatttcgatagctcccaaaattcactcaccgtgggcacttggttacaattttgcacccctgaaaataaaatagaaaactcgcctctagtaagcatgcgagagcgagggcagggctttgaagctgctacttgcttggcgggcgacagggtccgctgggggcagagtcgtttacacacaagtgagtggcgctgtaatgagcaggaggaacagtcatgtcccatctgcgacctgtcgcatcaggagaatatctgtagtcacctattctgcccggggccccaaatgcgccaccagcagtgtcgccccgttttttcattgtctcaggtgtccagaggatgatgaccaggtctttgaagttgttagtgggattaatgggtacagcaaactgggctagacatctggtttgaattaggaaaaagcattgattaatctttgagaggtgtccccaaagcagaacctttcccctcctcttccagtccccttgcttaagcctcactatcttcttttcttttaagtcacactgcagaatagtggcttcgcaataacatccgtgtgaaagatcgaattgttttctattgctcagaggtggggtggagtgggggttgatcaggaattctgagatttgtaagcgctgctttctttaacggaaattgagctctattttgagggaaattagttttgcagacttcgtttaaaaaaaaaaaaaaactaaatcttttgttcaccagctgctcagcttttcagtctgggtctgagctgaaacctgctgcaagtctgacggtaagactttctttgccgatattttgggaatctaatattgttttagacttcgaaaaggggtgttgttcaggttgcacgtttctaggggctttaagcactcgcaggatggcgtccaggacttagatcttgagaatatctcttcctgccactccccacgcccttggctctttaagaataaaaagaggtgggggagttatagtcctccaatatcgtcggaatatttttttgtattttcattgtgtttatggtttcaatatgtgctctgatattaaaagttaaagtacaaagagcaacactaaacttccccaactcatgtagcttctctatggattctgggtgaaagcattaaaggctttatttaaagtgagatttaggcaaccacctcaataaacctaaccagaaatatttacataatataatgctgtcaactaaaagcattgtggaaaatgtcagacaagacagactaaaattactcatgatctgcagacatcagtacaaaacatccacaacggtccttttggtttgcattacattggtttagaggaagctaagcaattactaaatgaatggatttgaatttaaccagtgtgttgcaggtaaccagcaacaagcacacacaaacctttcatctcccgaggctgccacttcttcttaaacctgcccagtgactgtgctggattttttctcactcactgtgtcagatgttaacaacctgtccagaagtttctctacaacctgccccagtcagtcagcctctagaactgtggggccagaaacctgggaagaaaaatttaagaaaggttagaaaaggaggaagtcattccaaaggcatgcaatgaaaacaaagctagcaagaaaggtctttttaattgaagacacagaacatttaatatcagcaaaaattatgatgtccagttttcttatagaaaacagaatataaggaaaatatttggaaggaaaaaatgaaggactaaaaaggacgtcttggtgaattccagaattaaatataactttaattttctctggatttctaaatatgtattaatcattacataaagatttttaaattttattagaatatttggaataagatagaatattgaattttatgttctaggttatagagaaatttttaaaatgtagtaacaacgggaaaaaaatccctagcatttcctataatagctacttcagtgttcacatccataaaatccaatattgaaaagatgcctttttacctaatgatatcaagaagaatggtaaaaattataaaatttattataaaatttctatataacaatcatttacaactatgtatgatatagtatttatcctacatttataatatacttgagttttcctgaagataagttatattaatgccaacatttcatgtaaggtttcaatatcaagtaacacattataaagaggttgattctgtgaaaaggtaagctacttagctcttgcagggtccacagctataattattttaaacgtaggctaggttctttaaacttgataagtgtgtatatctattgtttcctcggcttaaataaaatgacattcaagagtaaaggcagagatttctttttattaggactattttattttaaggggactagagctcatattaagcaatacaacaaaattgtatttaaattttactttaagattcacaacgattcttttaaaagttgccattcttctgcacacgtgtgacatgagttgtcatggaacttcaaatatttaaaattaaataggaaactctactttgaattttacctaatagataaattttccttggtaacatatactcataatatatgaactaaagggtggataattaaattaatgttgtaatttgtttctgaaaactttattgggtatagaaatattatttctgctatattttgccaaaaagtagcagttatgtccttcagttggttcttctgaaataaagaattttgaaaatgtatccaaatatgctaaatacccaatggtaatttatgtgatttatgatgtacattattttataaaactaaggaactgattctccccaggaactatgcattataaagtttatggaacaattttgctatggctaatgcatgttatttagtgattctgtatacttttacacatttttaaaatgttattatttttatataacattaattggtacattcacagtaaaaattgttacattcattttacatgtaccaaaagaaatgaatacttaaaaccttacttctaaactgtaa

SEQ ID NO: 393 - DNA, 8060 bp, Homo sapiens
caggctttggaggaggccttggagactcaggctgggaatagaactatgaaaaatgggcttcagtgctcctctggaacattaacctatggccataagttaagtagttgcagctgtggtctcattggtaacttgcagcaccaccaattgcatcaatgcatctttcttggaccatcttgcccacctgtctggtctgaccactactgcaagcttgcatcctttggcatattgtcattttctctgaagccccattcagtgattcattcattcatattctttctgtctctccccacttcccttcccttcctccccctttctctttctcatagacacatttgtccagagcaagacaagatcacactttgacagccctctgtcaagatccttgctccaaatctccagactagcagccaggagtctccatgctgttctgaagaagcagattcctcacccacccttcaactccttcccaggaggtaatcctcctccaaatctctggaaaagatacacctcctcttctctgataaaggctggggggtgatgcccctcccccagtttcccaataaagctatgcaagacaggagcaagggatctcacggcctgtttttgctacaaaaaccctttttcggaaaaaataataaagaaaggaatcagccaatccctcctcgatgccatcacctcttctcggtgatttttcggggaaggagtgggtgggttgctatggcaacagatgcgagctcgtctcagtaaagaagggaccttgatatttttttctctctctcattctctcagttgtgtgtgtgtgcgtgcatgtgtatgtgcgcctgtgtgtgtgtgcatgcgcgctacacatgcctgtgcccacaccaggaattttttttttttagaactaaagaaagcccttctcttctctcagctctccaaatatggagtgatggaaaaccacttactcctgcaggccagggagaattcaggatgattcaagagaaaagggagaggtcatgtggggctcctttcctccatgtttttactagagattgcatgcaacaagagagctttgcaaatggttagggggcctttggaaagaggagaagatgttaggtggaaagaggtgagcaagatatagatggtgcaggaactcaacgggtgacctcagagagggcaacagaagctatattgagtctggggacgcatgtacatcccaccacaccatcagatgctgaaagacccagagcagactcagatatggacacaaacacagacactgacagaaaggcatatggaaaattgtagacataaatacacacaggcacaaacatagaactgcacagaacataggaagttggagacaaaaaaaaaagacaagcatagatgcaggcataggtaaacatagatatacaggggtacagactcgcagctacaaagacacatgcaaacagatagagatgtagacatccaaccacctccagacaggtttggaggcagacacacaggacacacaaacacagtctcagtcaaatgaacacacacacacacaaacacacagacacacacacagagtctggctcttttccttcaattgcccaagcatccttgagcagtagtgcatagctgaggatgctgcacgcttgcccagtaggtttggctgagaggcttgctctcccattccttctacacgctcaccccaaagcccctctcccaattcactcccttgcccactttcccacagccagcaggctctgatgcctcccccatctcaggcttctaattcttagcttgttctgctgctgcctgccacttgggggagagagtggggtgactcagccaggccaggatgactcacactgccagtatttttagcagcggccaggagctctctagtgtgccagccgcccccctcctcctgcttgctatttcggaaccgtcactggtgatataaatagctcctctcccacggcctgaagctgctgccaagctatttttggttctgcacagttaaaaatagcttcacggaggtgggaggcaaggggagtgggagctggcctagggagaggagacattggggcacacagagcttctcaacttgaatcagagtgggcgaactaggatgagcccttctctaccccctcccttgtccctttctagacccttcttcccttccaaagtgtttcttcccattccattctcctggaaaaagccaggggctcttcccctgagcccagttctcctcccttgcttacttcacccttagagcccagaaatcttggccccctgcaaaccctccatattcattcacagagaataaggggacagtcaaagagtaggctcactctgaggcctgtgggtacccaagccctacgtcgatgtccccggcaaaccgtagcatgacttccatggtgactctttcagcaccacggacagcggtcggcgcagtattccttcactgcagattcgctcagattgctggaggccatgacacccagccagtagactcctcttattgtggagggggacactcagaatgcctcacaggcagctttagcatcagtgaatgaagaacacaggaacaacccccctggaatttcatacggaaggggatccaaagatcaagggattgttcaaatggaagattgagagaggggtgggtaggtacattagaggtcagattgagaagaaagaagcaacacagacccatgtccaggaggaatcatctctctgtcatccaggtcaatggggttagagacagtggcagacagataagcggacatcgttccctccacctcagctgtgacactgaccacaggatggccccaacctctgccaaaatgcataagacaccagaatagggtctccacaccttgtacacctcttctaagacatacttctcctcagccgcctctcctcccactctacctctcttactaccacccctttccatgaggagcggagagttccctggccccaaattgtcctttttgatgtcaaagttcatctccatgcttcctgtgtgactgggacttcccagtcccaccctccaatttttaagtggcctcatttccagccacttaagtgattccatgcgcacacagctactccatcaaacgagatttcagataagaacattccctagcccacttgcttcttgcattattgaatcccaggataagaacggcacatcctcgcccctgtagagagcaatcatctgtggtgaaaagagaaaaaaagcgggtgtgtgggggggtggggatagggcaaaggtgacaggatatgaaaaggatagaaaaggatatgaaaggacagaaaaagaaacgaaggtggaaagtggagagctgaaggtggagaggcagagccaggagccttagaggcgcaaatgtggagaggggtggagggaacctggcaaaaatacagggtccctggtaggtgcaggggtcatggagggtccggcgctgccccttcgcttctcagctgctcccccatcttgcccgcctaggcagggcggggagccctccggagcggtgcggaggcagccaggccccgcccgccgcagccgcggcagccgccggaggattcctgtcctaatatggagctgggattcccccggccccgcccccgcccccggcccgcggggagacagaggctggcagcagggcggggggaagcgctcgcttgggggccggcaacggggggaagggatgcctaagtgcagacccaggtcctcgccgtgcccccacgtccctgcctcagtttccccttcagtaaggttaattagctgagagggaaaccacgaatcactgcagactacagcgctgatgttggtttctattcttggctgtgggaaaacaggatcaacgccaaattcagctggtccctttcccaccggactccctttccacccatcctcgggacttagacccccatgaacaccccctgataagccgccaaggcccgatttgggaagcgggggcgggaatttgttctctaaaaatggccaagggaatcccaggttaaatagtccccagagaggaaccccagcagtgacctgtcccacggaggccaaggaaagtcctccttccctgcatgtgaacgtgaccttgtctgtcaagtaacgagggggatttgtagacaaccctgttcttccccattccctcaactcctcagaaaaattagtgtcagtgccggcccctctctgccctctgcggactcctgccgcgggcttcaggccgccctaaacctggccctgtcgcttccctcaactgaacgcattcagacgccagggtccccacactccattcaagctttcctaacgcagcgccttcctctccgctcagctcccgccaggcttggccccctccgcagcctcctgctcccccctcgcccgcctccctccctctctcattctacgtcatgagatgacgtcggaagccgggcgggaggaggagcccccctccccagtcagcggctcccgctgcagcttgcttagcccagcctcccgctctcccgcccccccggctctaaaacgagccccccacgcctggcaggagctatataaggcggcgtgaggcaggcgaggggggcagcgcagccgagcggagcccaggagagcagagagcgagcctgagcgagagacggggaagcacggaggaggaagccgccggtgcgtcgggacgggagcgcaggtgctcgggcacccgagctggagctccgcagccgccggtcatgtaccgctccaccaagggcgcctccaaggcgcgccgggaccagatcaacgccgagatccggaacctcaaggagctgctgccgctggccgaagcggacaaggtccggctgtcctacctgcacatcatgagcctcgcctgcatctacactcgcaagggcgtcttcttcgctggtggtgagcatgctggggctaccgcagatccgagctgccaggcgccggagaccctggagctgagggaacccgctggggctgtcgcatgtctagggcagcgtgctggcgagctggggagattcgggactcgggagattcgggactttctacttttcctcctgagctccctccagacctcaccttagttctgaatgagagttagagagcctggacggtgtccctaacaccagattatgagaggataagagccaggacagagcggcctcggtgcccgccagtgcagaagcgctccgggagccggggagggaagcccgggaagttgcagggatggagctgcctgagcctaggggaacatagctactgtccgcggtgctgaaagggatctcctgtcgccttcggggcgctgcccatggtgctgacggctgcgccggccgtgtatggctctgtccatggttctgaacccacagtcggcttcggagctctgtccgcggttctgaaattcagagccgctttggagctctgtccgcggttctgaaattaagagccgagaggagccgaccccgctttagaagtcgagggcttgtgggctatggagatacagcaacaggttccctggccaagagctgcgggcagcgggtcaacaggtgtttgcagaggcaggtccatgagaaattcctctggattctctgaaactcagaccatgccttcctcacttcttctctgcctcccagtcttactcctgacgcactacgtcttctcgccctacaggcactcctctggcgggccccacggggcttctctcagctcaagagcttgaggacatcgtagcggcactacccggctttctgcttgtgttcacagccgaggggaaattgctctacctgtctgagagtgtgagcgagcatctgggccactccatggtgagtgctaagggtcctttcagctgaggctgggcatggagtgggtgccgtgagccttccactcctgaggaactgggaattactatggagggagaggttataccctacaagatactgtagatcaaagattggctcctgctgttctccctaatggtcatctcttcttttcctccctccaggtggacctggttgcccagggtgacagcatctacgacatcattgacccagctgaccacctcactgtgcgccagcaactcaccctgccctctgccctggacactggtaaggactcccttctcccttcctcggtccaatttcccacctgctgcccttctccccaccatccactgtctctctctcagccactcaccctcttatctgtttttctcttcatctatctagatcgcctcttccgctgccgcttcaacacctccaagtccctcaggcgccagagtgcaggcaacaaactcgtgcttattcgaggccgattccatgctcacccacctggagcctactgggcaggaaatcccgtgttcacagctttctgtgcccctctggagccgagaccccgcccaggtcctggccctggccctggccctgcctcgctcttcctggccatgttccagagccgccatgctaaagacctggctctactggacatctccgagaggtaagcctggagtgttcagattccaagagaaaggcaggccagagatgaagggaccctagattctggagtcaggggcagggaggatggggtttaggggggcagaggatctgggagggagtgagatgcatgggtatcaagcaaggaaaacagaaagctgacctcaccctttccaccttcccagtgtcctaatctacctgggctttgagcgcagtgaactgctttgtaaatcatggtatggactgctgcaccccgaggacctggcccacgcttctgctcaacactaccgcctgtgtgagtgtccagagaggctggggacaagatagcaagctgggaaagggcatgggagaccagacaaagaatgatctgtagtcaagagtgatgctggggagataacagaggccaacagtttcggatgctatagggtgaacatgaaggtgaggattcaaggcaataatcaaatcagaactgggggactctgagtggtgaggtcaaggtagagagctgagtggttcaggtgagggtagtcagaagagaggatgtcacggctatctcaattcagtggagaggtgaccaagggtggggagtaggtagaattgcctggtggacatcctaactctgcatcttctttctccccagtggctgagagtggagatattcaggcagagatggtggtgaggctacaggccaagactggaggctgggcatggatttactgcctgttatactcagaaggtccagagggacccattactgccaataactacccaatcaggtaagccacaagccaggggactagggggcagctgaggtcgtcatggaggagacacaaatcagggaactgctctggatatggacgtcggacccttaccagctgcctcttctctcctctccagtgacatggaagcctggagcctccgccagcagttgaactctgaagacacccaggcagcttatgtcctgggcactccgaccatgctgccctcattccctgaaaacattctttcccaggaagagtgctccagcactaacccactcttcaccgcagcactgggggctcccagaagcaccagcttccccagtgctcctgaactgagtgttgtctctgcatcagaagagcttccccgaccctccaaagaactggacttcagttacctgacattcccttctgggcctgagccttctctccaagcagaactaagcaaggatcttgtgtgcactccaccttacacgccccatcagccaggaggctgtgccttcctcttcagcctccatgagcccttccagacccatttgcccaccccatccagcactcttcaagaacagctgactccaagcactgcgaccttctctgatcagttgacgcccagcagtgcaaccttcccagatccactaactagcccactgcaaggccagttgactgaaacctcggtcagaagctatgaagaccagttgactccctgcacctccaccttcccagaccagctgcttcccagcacagccaccttcccagagcctctgggcagccctgcccatgaacagctgactcctcccagcacagcattccaagcacacctggacagcccca

SEQ ID NO: 394 - DNA, 8060 bp, Homo sapiens
caaacacccccgtttgcccattattgttttacttaacttcagattgtgtgtgtgtgtatgtatgatctcaccagggaaaaattctgtgtaattctggataaaatataacgctaatgaactgactagtaactgcatagctgtagtatttaaaactgtgattattccaactgtgattatatccagttaccaaggatactgaaagttcaggatcttcatttttgtatattattccacagccttatattctttacacataaaaaaagaatgatgcttcccaaatagcgtcaatatagcgatatattaacttttctttttagcaaacatgacactaaacgtcatattcattcatgagagaagagttaagcaaattacaaatggaattttctcttttctgctgatttacactttattttctatgcatttctggtcatttctatatgtgtatagataattttcataacactatatatgttttcactgaaaagaacctgttatttaggaatcttcacaaagagtgaagagcatgacaaaaagtacataataagagaatagtgcaggttttatactccttatttgcatttaactgttttaacaactatcacctcaaaataaaaaggaggtgaatagcaaatttgttaagtttttgctgtttggagacagtaagagatgaagagatgctactaagccctctgaataccaaactggaataataataaagctgtcttttaaaataacatgcttgtgcctgtcagtagctgctttatttgagtttttcattgctttgtttatattagtgccccctccctcctgggtgcctctagaattaaacaagcaggtatttaccaccaacttaatctttagttttaaaaatatagaccaaactctaaggttctctaaattttttatatttatttattgcagaaaaatatacaaagatatttacaaaacaatcataaaaatatgaatgcatttagacaccggatctatttgcattttaccatgggtcctcaataaataaatagaatgttgttttttgtattttaagtttttttttgtttttcccctcagaggaaggatgaaaaaaagaattaactgactatggttttgcaggccagtttgatcccagtatttttatttctaaaggtgttcttatagttcctctgattgttaccattttaaaatagagaaagtccatagtgatgcctttcctttcagtggctgattggcacgacctcttgagaatgcatgcatgaaaaaaataaaaataaaaacattcttcgtcaaaaaaaaaaaaaaaaaaaacacaaacaactgttcagacttctatcagaatgcagaggtgtgaggatggtgccgctgcccgtctgggaatcactgtccacgggcctgtctcgctttctcttttaaaagtgcgccccacgccctgtttctttgaatttggattttgctcttctaatttccaagaaaatctttggcatatatttttatttttagttatccagctccagagtctctagactgtccattttctccttctctggaaacaatgacatctgcaaaaacccagaggggggggggggagtcggttattgtttaggtctctgcggctgttttctaagactagtgagcactgttcttatcaccaccactgagaaattaagctgaacaacctggaaggatttcagcccaagggcaagaggaagtgggtgggtggaaaggaggaggaggtggaatttgttttaaaacatttgttttaaggagaacaaaaattgaaagccgaaagaaagggtggcgctgacaaaacggtccttacccgtgaccctgggtgtctctgtctcccctcctgtcacgcacactcacgcgcacacacacccctcaccagggcgcatccccctggagactgctctccctagcggggtcagaccggccttccggggacgctgggggcgcgaggcaacggtgccaagtgaggtgggaaggctgagcggagagtgggagaggggaggaaatcgaggtggactgggaaccgcggcctggccggcctgccgtctgccacctgagaggcgaaggggtgcagcggcgcggtccttacctaggtctccggccctgctgagggggtggggggctccgcctgctagtgggacgcggacatggaccaggccccctccatcctccagaccgagaaggcgtagctgagccgctcgtgagccacatagctgcagcttgccatcttggagtccagctcgtcgctctggaggacctggtagaggaagtcgatgtacctggccgccagcttgagggtctgaatcttgctcagcttgtccgagggcagcgtggggatgatcttccgcagcgcggcgaacgcctcgttcagcgactgggtgcgctggcgctcccgcacgttggccatgacccgctgcgtctgcagctcctcgtaagactgcggactcccgccgccgctgctgctgccgccgccgccgcccgcgccgccgccgccgccacagcccgcagacttcttgccgcgcttgccctgggccgggctgcccggctcgtcgccgcctccgacgcccccacccgcggctccgccgggccccgcgccgccgcccgcgctgcgcctgctgctgcgccgcttgcgtcccccgcgcttgccgctcggcggctgctgccggtctggctcttcctcgctgttgctcaggctgtcgtcggccggcgagactggcgagctggacacgtcctgcatcatctctcgagcggcgacgcgtggcctcgcgggcccggggcagaggagaagagcggggcgcctcagcccgccagcttcccccgcgcgcggcgccggcccgggcgatgcggcccgcggaggagagagcaggaggacggacgggagggacctccgcggggagggcgcgcgggggaggcggggagggaggcgggagggggaggggacggtgtggatggccccgaggtccaaaaagaaagcgcccaacggctggacgcacaccccgccaggcctcctggaaacggtgccggtgctgcagagcccgcgaggtgtctgggagttgggcgagagctgcagacttggaggctcttatacctccgtgcaggcggaaagtttgggggcagcagtgtcattggcctgacgtgaggaggagggacttttcgaagttttataggaaagtttccgctttccagtccccctcccccgtcccacctcccttcctcggggtctaacaattcgtcctcccaaaccattcaaaaacgacctggcccgggcggccggcccctccacccgcctcctagccgccctcccccttccctccccgtcgccttcctccggcgggcgcggggcgatttccttccccgccggagcgtgcgggcagcgcccccgaaccctagcgcagcccaggaagcggtcggaggagactgtcctggccgcggtggcagccccatccggagtggctgtgacagcagcaatggcaacagcttctacacagtgggtgatgtctcatctcgcccaagagccctctaggtccgtggggccgatttgggattgctggggctgggggggtggtgtggcgcggggtgggggggcatgccaagaaaagtgtcaaccgcggagcccacccaatggtcaggtagacgaaccccttggagttccaaaggccaaaccgcggcggcccagcccggaggtcctgggcgtttctgaagacgtggccgcgccgcgggggctgaggatttgcgtcccggcctgctctctcgcccttctgggccctcctttcccctctacaacgacccagtctgacgctccccaacatccaaaggactacgcctcggaaggtgctcgaaagaggcagaagttcactcttcggtggaaggaaacccagtccatgggaaaggcagcagagccagaggggggcagcgcagcgcctttgctgcggccctaacagctggcaatgccaacccaagggagagaccctgtggccatttcatccccacccccaaattaggctccgcattgtgaccttgaaaggccagcttgtaagagagtgaagtgggaatttgatagcgcctagacataggggctgcccgctctgagaccccccccgccccagcccccactatctagggcatccagtggacaattaggcttcgtgagccccaattccaaatgcttggatacgctaacattttaagcatttctgtctgtaagttaaaacgaagagccccaaagagggtgttaatgtagatcctggcaaactggaagcagcaaagttggtgaaccagaaaggaagtcgccttggataagaagcccatcttttgcaatgccatacttgtttcctttttgaaatgaattgaggtaaaataaccgtttcaggtccatcccttacatggcaaagtaaaaagctggagtcagtacacagtgttggggtgggggcagcgtttgggggcgacgagttttgtgcaccgcgctggagtaccctgcacataaggtccgctcatgggcttctcagtacggactcgccggcgggaacaattaattgagcaaagcgcccctttctgggctggagcaaggttcgcggctgcagatatctcaagctgaaggcaagagcccaggcgaggcgcaggcaggccacgtggctgttccctgctgagactcgcagctttggtcttggaaacctcagggtgtggagctgcttgggccgactgaagggttcagctttttgggagaagtgagggcgagtgttatttctccagcgaggtgtaaacaagactgtgctttcatgggagggacaaattgcagagttgatcccttaccatttttacagaaatactcagaaagtgactacagcttgtcaactggcctgtttagtgagccgctgccttactgtaaaattgtctgaaaatcagattcgacttgacctccacttaatttcagtagcactctagcagttctcaaaacagtcacccctgcacccttgcgtttgcatcttccgctacaggattttatctcttggaagcgcttagagaatgcggcagaaattctgccccactctccaccaagtgttctttttgtaaatctgaatttacagtattctgcaattcttatttagaacgtggctgcagaaatctcgaaaccttttccacttcagctatttttttaaagataaatcttatttttgttttgttctttttttctcttttctcaaaaataaataaagagatcgaatgattggactctttcctttgtggccacggataagtaagacaggaaagtgtgggtaaagtgtaaaggaaatcttacctgaccaaggggaatttgggaaggggaggggagcggacaagctagaggagaaaccaagtccacagcagcgcagcagccaggggtcattagccagtccatcttgcaaagtcatcagtctcaaagactggttcttaaacaagtgagcccagcccttttcccggcactaaacttctagctgatgaagagctcctggccattgggtacagggatccccgcaaggctcaggcgacgctctgatgccagaatactgagaggggaattcaaaatgaacacctaaccagaaccatcctgcccatggactctttcagccacagtcacaattgatgactagttctaagaagaaatggctcttgaactgttccggggagtggaggatgagacgacttttgagttcttaagtggggcttgaatgttacttttggagcaaaagtagtccaggaggtacctctcaaaaaatggctggagctagatactccctgctttgcaaactgcaacacgccctggctgacgagtccagtctgctcatatacagctctttcttatctaacattttacctaacaattttcttttccacatttgcaaggatggctccctttttacttgttgacaggtcaggtataattctggattctcttatatatgcaacaataattgcaacttctgcaatgtttagtttaaatttgaaagcttctttctaaaatcccaatcttgagatcatgaaaacaatcttagaaattttcttttgaggctgaagttagcctaactggaagtatgtcagtggggactaccttctttgggaatgctagattaactggaattcagtcattttgcctccttctaaagtaaagtcctccccaaaaaaatttaactgaaaaaaaaaatttcttttgtacttggatagttcaaaacgatctttgttttcaaactgcaaacttggcatgtttgcaatcctgcctgaggaatgtgtgctgtgttaaaaattgaaacaaaaaatactgttaaaagtaacagagttagaaatctcacattgaacatatacaataagtattaagtatcctggcagtttgaatatgctgtgacattctcttagcaacaaccaattataaatacttttagatacggaaaagaaacacacactatagaatggttagccaactggtaaattctggagtttgggcttgcataaaaggtgagtacctcaatctgttcctactcttctttctcctcagaccttagatggcctatcacctgtttgttggctccgagttctgagaaataatttatctgaattgcataaatagtgcacaggagcattcgcacggaagggagtgaaaattagaaaggctgcaattgagtgaatatcagatgaggttgtatatcttagatttcatcttgctttgaacactccagagggactgctgtttaaatgagagaattttagtaaggtggaatataaagtcatgtatgtcaacacaataactgtgtaaaagcttattcttctttcatgaccctggtagccttaatgatgtttgaacacctttccctatataaaaactcattctctttctctttaaatgatgatttgattcataaactcaactgattctacatttttctatctgaatatctttaaaagtaaaaaaaacaaactaaagttataaaatgtgaagttttcaatccagaaataaaacgaaaaagtaaaaaacacaataaattagggtgcgaacagtaccgcaagtgaaattttcaaataaatgttaatctttaaaatagctgacattctgaactcagcttaaggatgggatgaggagacataggtctaacctgtagaaagtgcaggatcagaatatggaaaagtatggagtcttgaagagcatttttttttttcattttttttttcaggggttgtgcaggctggagagttggtgtcttagctgcccattaaccttgttggaaaacacactcacttcacttgtatcaaagagttgctggaataactgatgaaagaatgcaagaaataaatagttattcataggaactattatcatggtctcagtctttctacatagcattatgtgtcttctttttaatcatccgatgaccagtaatttaaatataaatggaatgatttacattctatgttttttcaattcaatttctctttctgattactcataactttcacctttcttcactggaagggatttccgtttttcacaaatgggttttcctgaagccttatgtcctgctgctattgtttggtttggttctttctgcagaaaacatgttgtttttgccagtcaccacaagaggacacaatttcccagataactttgtttagaaagaagctcagagaagaggaaagctaacaaaacagcaaaaataacacacaattaatgaatatcatttggagatgtctatttgatttatgccatttttattaattaaaaaaacatgagttagcattcaaacttttgaagattttataatttgtactttcttagaacataaagaaaatatactaaatatactaatgtagttaagggaaaatgtttattttacgttgacataattttgtagaaaactcttggtgactttgaattttacttaattccatgtttggcaatgaaaaacagtttattttttttttctaaaagatttttcaaaatgccattaacagtttgaatttctacttcaggcatttgggttgtctttacattgaaaactatatgaaaactatgttttatagttttccactta

SEQ ID NO: 395 - DNA, 8060 bp, Homo sapiens
ccccacttcctctttgctgccccttcactttcttgctgcccctttcccagtctctcttcacacccactcctggtctgtcctgatcccctcttctgtatcaggtttattggttgtacatataaattatactttcctttctgtgtgctctgttattttttatggggggggggagtttttggggggagggataagaaaggttgttgctttctgccttttctttttaaaaaaatcctacaactttttccttttcctcatttttatctcttagattattcactaaaactgaggttcttccagccccagctatgtcatggcctctgtagagaaggagggtgagcagcagatacctacgtagcctcaggttgacttcagagagagtgggacttactggacagaaatgtagtgggaggagcgcctatcaagattcaaaactgccttccagccatccttttgatcatcctttccaccttcaagttgcttagttcccctaagagtcagtagaggtcactacagctccacaggttcagctccagtatgaagcaaaggcacactttttttttttttttttttaaggcgttgagggtcagatctgtctagcttaccaaagatttgaactgctaggcacttccttgatgtttattgttcactaaacagagcctctgagagattgagagaggccagacacttagttcacaaggctattatattaaaaaataagagataaagccaacaaatatttattgagtacatactatacagtaacactgctgttggccctggagataaaacagtcacaggtcagcccttgctcccatagggcttacactccagtggggacacccacaaagcatgaaaataaaagcagtaaaaataaaacagggcattatgttacagaggggtgggggaaaaggctctactatgttgaaggcagaaaaaggcctcccaaaagagggagcatttaagctgagatgtaaggacaggaaaatgccaaaatagggttacaaaaattgaggtttatacccccataagtgtataattatgatttgtcaatcaaaaatatttatattttaaaaagattggaggcctctaaaaaattgaggttaataataagttcacatttttaactaagagaaaaatgttacatagtaggttaggatttctttagcaatagaatgttactttagaactttggggccgggcgtggtggctcacgcctgtaatcctagcactttgggaggccgaggcaggcggatcatgaggtcaggagatcgagaccatcctggctaacacggtgaaaccccatctctactaaaaatacaaaaaaattagccaggcgtggtggtgggtgcctgtagccccagctacttgggaggctgaggcaggagaatggcgtgaacccaggaggcagagcttgcagtgagccgagatcacgccactgcactccagtctgggcaacagagcaagactccatctcaaaaaaaaaaaaaaagaactttggataaaataatctatcagtcatacctattatgctttaaatattctacctacagatggtgatatcctaaagagtgtaggatctagaccaatggtacttaaattttcacatgcacacacatcacctgggattgttaaaatgccagagtctggcccggcgcggtggctcactcctataatcccagcactttgggaggccaaggtgggcgccatcacctgaggtcaggagttttgagaccagcctgacaaacatggcgaaaccccatctctactaaaaatacaaaaattagccaggtgtggtggcaggcgcctgtaatcccagctactccggaggatgaggcaggagaatcgcttgaacctgggaggcggaggctgcagtgagccgagatcacgccactgcactccagcctgggcgacacagtgagactctggctcaaaacaaaaacaaaaaaacaaaaaaccctgccagagtctgattcaggaagtctggagtgggatcctagagtgagactgtgcacttccgttgacagtacaccaacactgctggtccttgactatgactttatggtcataagatacaggattctaaaatagaatacatggcatatatacaacaggtgatgtcccattatgggacacaaattttaaagacacttaaaattgtataagtatcttttcagtagcgctagtgtgttcccgtgactgtaaagataacacagataatagcaaaagtttgaaatatgatgcctttcaaatggctctcccttcctactttgataggctctaattaggtgcctcacataaatgccctttggaatttctgatacctgccctagcaggttgaagggagattctgaaatgaagcaaggctcctaatcatagtcacaggcagggagccatctcaatttctggaacacagaactgggagtggggagacagcaggcataccagcacccttacatgccagagaagtgagattaacatgacgcgaaaattagcctcttctctcccgttccatcttaaaaaaaaaaaaaattcaaaccattgacaaagaattgctaaaatgggacctgttgctcccacacaccagagccaccctggacaaaagccaacgtcccagctaagaaaacagtctgtcttcttcccacggtaacgtaggctttgtttatatcatcccttggccactccatcctgaaaatgtaagactggcacagtcagtagatgggggcgagttcgtctaggagcctccccaactcagcatcaacacctcccagggcgttccctcctgccttcggctcatctctctcatcacatgccaatcctgggatctgagagagagtagtcttgacatcagcccccgcgaggctgcagctcccaccttccttcggctgtagcttccgagttcctcggttacaacgtgcaacgggtcaggtggccaatgtccttgatctccgcacagtagagcactgggggaaagaagaagggttagtggcagcaggagcatgccaacgaacctcggtattcctcggcgctctctcccctgcatcctccccgggcagcccctcaccgttgctaggcagcggacgccgccagcgccgcgcaggccccaggaccctgtcccagagccgccggagcgcgcgccacccagcactcctaggccccgcccccttctcgctctccccttcttcctccgcctctccgtcagcgtcgctgctttccttggccgggttcccagcctcatctcgttcgcacttggcccgcgctttttcctccaatcgcgaccacaagtccgagtcaagagccatctccgtgaggccgccgcgagggagctgcgagggcgcgcggcagaaggggcacgtgaccacgcggcgcaggcgcaccacgcgcgcggccgccccgccgccgtccccgcgcgccgccagctcgcggaggcaggcggtgcagatcgtgtggccgcagcgggcgcgcgccgttccgggcaggcggcggggcgcgcggcacccgaggttgaaaggacggtagcagatgttgcagtccagctcgccccgctccggaagagagggtaccctcaccaagagctgcatcgtgcccgccgcggactcgaggacgtcgctaacgcggccagctccgtgaacagaacgagcacactctcctggggccgggtcgggtcctggggccggcgccgcggcctctttcccctttaaataggggaataagtgaggccccacccttcggagcgtcacgccttgatcgggccgctccctgtggcggcacgtgtgggggcggtggaggcttgaggccgggaatgacagcaatgatggagtcggggaggcggcccaggccatgccaggaccggagccctgggggccaaagcacccattcctccctactcccgggggagcggggtggggctttccttcttcccccaacgcaacgccagcgctccttaattctaccatgtacaaagccccgggtctctctctgcgcctgagccctcagtcactggcacaagtctctaaagccccctccgcctattcagttgctcgcagttagtttcacaatcccacccagtttccaaacacggcccgttctgcccaacctttagtggtccctgggcctttgaatcgattttgccctcaattctcattatagatgacctctctgtgttgtttgtaaggctggcttcctaaacttcattctccccaaactgcttaactctcagctggtatctcagcctaaggagggacctagatgccaggaccatggctttaggaatgctgggaatcctttccttccggaggcctggacacccacacatcgtgatggccccagcaaagctccccagcataagttctgactcaggggtctgacttctcccactggtaaacaggacatggtactcacaacccacattcccctcatggtgccacacccacacacagctgcctcctcaccctcctctcctggacctgcagcccaggttctgttatggagggtgataacacagtctagagccagctggcttgagttcagatcctagcttccacctcttactagttgtgacactttgagcaagttacttaatttctctgggccttggtttcctagttttaaaaatgtggataataataatgaggactgaatgaacttatatgtgtaaggtgcttcaaatggtgtccagtacacagtaaaacaccaggtaagtactatattagctactattgttatcctgtgcccccagcctatactgaattcacattaacttctgagtacccaacattttcttttttttcttttttttttttttttgagacggagtcttgctgggttgcccaggctggagtgcagtggcaccatctcggctcactgcaagctccgcctcccgggttcatgccattctcctgcctcagcctcccgagtagctgggactacaggcgcccaccaccacgcccagctaattttttgtatttttagtagagacggggtttcaatgtgttagccaggatggtctcgatctcctgacctggtgatccgcccgcctcggcctctcaaagtgctgggattacaggcgtgagccaccgcgcccggccagtacccaacattttcaacacccatccatcttgaccaatatgtgcatgatgagcttctccacacccatggcatttaccagctatcacaggcaatgcaaagctggtttttaaacctaaattgttaaaacctagagggtaatctcttttgaggaggtataccatcatttttaagcaaacatttcagaacttttgaatggtattgtctgtgatcatgggagaagctgtctacttattacagtgatgctgtcacaattcaaaactttttggtcttaaaaaaggactggtagggccaggcatggtggctcttgcctgtaatcccagcattttgggaggccgaggtgggtggatcacttgaggtcaggagttcaagaccagcctggccaaatggtgaaaccccatctctactaaaaatacaaaaattagccgggggtggtggctcacacctgtagtcccagctatttgggaggctgaggcacgagaattgcttgaacctgggaggtggaggttgcagtgagccgagatcacgccactgcactccagactgagcaacagaatgagactcggtctcaaaaaaaaaaaaaaaagggggaactggtaggtatctattgttaataaatacatgatgggccgagtgtggtggcttacgcctgtaatcccagcactttgggaggcagagacgggcagattgcctaagcttaggagttcacgaccagcctgggcaacacagggaaaccctgtctctactaaaatacaaaaaattagctgggcgtggcggcgtgcacctgtagtcccagctactcaggaggctgaggtgggagaattgcttgaacccaggagacagagattgcagtgagctgagatcgtgccagtgtactgcagcctgggcgacagggtgagactctatctcaaaaaaaaaaaaaaaagcttttaatgtggtggtagattaatggtggccccaaattcctttgcaatgtgactttgctgcatctcacatcaagaattggggtctctttctctatcccttgaatctgggctggtcttgtaactagttttgaccaatagatgtggcagaagtgatgtgtgagttctggaacctagtccttcagaggccttgtagcttctgcttttgtccccttggaacactccctgagaccaccatgtgaggatgaggccacacggaggagcgccagccaacaaccagacatgctggtgaggccattttgcattttcctgcttggctcacctgccatttgagtgcagccacgtgagtgagcctaggtgaaaacagcaaaggaactcccagcaagcccatagaatcgtgaaaaagaacagtttttaaaagttatttctactgagtgtggtggctcacacctgtaatcctagcactatgggaggccaagatggaaggataacttgagctcgggaatttgagatcagcctgggaatcgtggtgagaccccatcattacaaaaaaaaagaaaaaagccaggctcagtggtgcacatcgtcccagctactcagtaggctgaggtgggaggatcacttgagcctcaggacttcgaagctgcactgagccgtgatcatgtcagtgcactccagcctgggtgacagagcgagacccccgcctcttaaaaataaataaaaagtggctgggcgcggtggctcacgcctgtaatcccagcactttgggaggctgaggcaggcagatcacaagatcaggagatcaagaccctcctggacaacaaggtgaaatcccgtctctactaaaaaaacaaaaattagctgggcgtggtggcacgtatctgtaatcccagctactggggaggctgaggcaggagaatcgcttgaactagggagtcggaggttgcagtgagccaagatcgccactgcactccagtctggcgacagagcgagactccatctctaaataaataaataaataaataaataaataaatagtggctgggtgtggtggctcacgcctgtaatcccagcactttgggaggccgaggcaggtggatcaccaggagttcaagaccagcctggccaagatggtgaaaccctgtctctactaaaaatacaaaaaattagttgagcatggtggcactcgcctgtagtcccagctactcaggagggtgaggcaggagaatcgcttgaacccgggagagggaggttgcaatgagctgagatcatgcaactgtactccagcctgagtgacagagcgagactccatctcaaataaaataaaataaaaataaataaaaagttatctcaggccattaactttggtggtgatttgttgtgtatcaatagataacggatatagagggtttcctactgtttttttttccctgtatgataaatatattttttgagacaggagcttgctctgagcatcaggctggagtgtagtggcataatcttggctcactacagccttgatctcccagactcaagccacctacctacctcaggctccgagtagctgggactacacaggtatgagctaccatgctcagctaattcttgtatttttgtagagatggggtctccccatgttgtccaggctggtcttgaacccctgggctcaagtgatcccacctgccttggcctcccaaagtgcttggattacaggtgtgagccactgcgcccagcctagataaatataacattgtaatgtgccctgtaagtccctgtgtgttctgaacttaccccttccttccttccttccttccagacagagtcttgctccgtcgcccaggctggaatgcagtggtgcaatctcagctcattgcaacctctgcctcctgggctcaagtgattctcctgcctcagccttctgagtagctgggactacaggtgggtgtcaccatgcctggctaatttttatttttatttttattttttatttttagtagagataggttttcgccatgttggccaggctggtctcaaactcctgacctcaagtgatcc

SEQ ID NO: 396 - DNA, 8060 bp, Homo sapiens
ggacaacttccctgagtaagtcattctttgttaatattttctttgactatatcatccagctctctcttaacctgcaaagtttctattaagaaaattgccagtagtcttgtggagccctccttgaaagtgacaaatgactttctcttgcttttttcaaaattctttgcctttgattttttaaattttcttttatcttaagttcagggatacatgtgcaatattgtcaagtttgttacataggtaaacatgtgccatggtgatttgctgcacctatcaggaaacaacagatgctggagaggacgtggagaaataggaaggcttttacactgctggtgggagtgtaaattagttcaaccattgtggaagacagtgtgatgattcctcaaggatctagaaccagaaataacatttgacccagcaatcccattacagggtatatactcaaaggattataaatcattctactataaagacacatgcacacatatgtttattgcggcactatgcacaatagcaaagacttggaaccaacacaaatgcccatcaataatagactagataaagaaaatgtggtacatatacaccatggaatactatgcagccataaaaaagcatgagctcatgtcctttgcagggacatggatgaaggtggaaaccatcattctcagcaaactaacagaagaacagaaaaccaaaacccacatgttctcactcataagtgggagttgaacaatgagaacacatggacacagggaggggaacatcacacactggggcctgtcacggggtgtggggctaggagagggatagcattaggtgaaatacctaatgtagatgatgggttgataggtgcagcaaaccaccatggcacctgtatgcctatggaacaaacctgcatgttctgcacatgaaccccagaacttaacgtataataaaaaaatcaagtatattgatactggggtcaggggatgagatatgaatgctgttttaaaatcaagagtcagggatttagcaatgcctaacatctaaaaaaaaaaaaaaagtcagcaaaccacgtgataagtttcacaattactaaatattgagtggagactttaaaaatagtaaaataataaatgctattataattattcttcaaatgtttaaatttttacttgataaatcagattaagaattttgagagtggtcatctttaggcctattttctcaaaggaaaaataatccaacatcctattatttcaaaaacattgtcagctaatgtttccttcaaattgttattaatctcccagcagtaatttgagggttttgtatcttaaaattcataaggtagtagtatatgaaagccaataaaaatgggtatgaccattttgttcctgggccatcaagacctgtggttttaatctttctttaatatcaaataacttaagctttcatcccatccagagaaattttttatctccataatttttctagagccttccagaaaagggaggagagtcataggaaggggatttcattcattcatcatttttctttctagattccttctttctaacttgagtttcaattacccctcactatactagctcctaaagttatggtcctctctctatatggcttaccacaaatgtaccataactcttctaacatttgcctgaacacttttaatgtattgtcattgcagatggtaaattttatcaaagatttaatgaacagtgtacaacaattacagtgctctacaggaaagatacaaattcagattgcagtgtggtatctgaagcatctttgatagttccttacaaagggaaatcttgtttaattgccatttgcctctttgggtcttggcctaaatgtcatgttgctgggctcctttctctccctgatcctgttctctgaattacaagaccttgaaatcatctcaatttttttttaatgttgtagaaaaatgcagctccctagttgaagcaatcatcttccaactatcctagcctcaaaggccagatctgtcccaacaacaagaatcatccagttgtttttctaaacaaaagataaagcagcaacaacttggagaaagatttatgtatcatccaaagagaaagcacattcaaattttaaaatagaaatatttttcatactcatatttgtggaaataaaaataataaaatgaagtagaccaaaagcatacttgagagagtagtagacttgaaattaggaataaatagtatattctagacttttttattatgaaactctgtaaatttgtaaatttaagtaagttattaacttctctgagcatcggtatcgtctccgtacaataaatacatattagcaattgagtttgtgctgtttgggtatacaaaggtaaataagaaatatctaccaaaagaaggtaaatgcatggtatgcagctgcaaaacaggttatattggatgatcattatggagccttttatatctgtgacactggcttttgaagggaacacattcctgccattggatgatgtacaagcagaagtaaaacaaaattatctgattcaagcttccagtgggatattatgagtagaaaataagaaaccccacaccaatgaattaaattctcatatgtaccctgaaaatacatacatctattatgtaccaatacaataataacatttttaaaaagaaaacccacacccagtgagtggcacagtgtcaccctagttctactttacctgattctttgcataacaattcgtctttcgccagaagagaaaggaagtccataatggaaaagaaaaaacatagaaataaatttcttccttaatgttattcctaaactgaaaacatggtgaaaagattttttttaatagtgaaaattatagagaaaagaagaaatctattccagaaaaattataatcaatttaaagaagactcagttttttttaccatggtaaaaagaaataggataagaaggctgctactataatattataattaaacaaacagaatatccctgtcttgtgactatacacacagacacatactattacttatcaaagtttcctactactcagggcttttcttagggcaaatttaacatctttgttcctcaggctgtagattaaggggttcaacatgggaaccacatttgtataaaagacagaagataattttctcttatccatggacccagcagaagatgggttgagatacataaatgcacctgatccaaagaacagagaaacagcaattatatgggaactgcaagtgctgaaagctttggacctgccctccttggaactgatatggaggatgctggagaggatgaaaccataagagataaagatggtaacagtgggcacaatgatgttgatgccaaccacagtgaaaaccaccagctcattgatgtaggtgctggtgcaggagagctggagcagagggaggatgtcacagaagtagtgatcgatggtgttcgcatcacagaaagtcagtctcagcatgcatccagtgtgggccatggcaccagaaaaggccatcaaataggaaccaaacataaggctggagcacactgtaggagacatggcaatgtgatacagaagtgggttacagatggccacagcgatcatacgccattgacgtcagcacataacattcagaaatgaccaaaaaaaacagaaaaagaaaagttgggtcatgcaccccttgaaggagataatattcttctctgaaataaagttcattagcattttgggtgtaaacacagaagaataacagagatctatgaaggacaagttaaagaggaagaagtacatgggggtatgaaggtgtgagttcagcccaattagagttaccaagcccaagtttcccaacagagtgaccacatagattactagaaacaggaagaacagaggggactggagatctggctgatgtgttaatcccgccagaatgaattcagtcacgaaagagccatttccaggtgccattcttctttaagggaatctctggaaacaggggaaaaaaacaaacggttgcattagaggacaacccagctctttccacaatgggtctgcctgagattagcctaacctgtacccacagaatctgcctttacagaacaccgccaattaaccctagagagtgaaggccagtgctgccatatacaagcatgactgctggaaataagggataagggagatggatggaccaggacagaatcgtttttttcccgtctcatcatttcttcattcatttgagccctcccctcacaagtaaaattggaggcagaggcctaagcgaccgacattggcctctaatgaaattagtcggatgcagtgaaaaccaaaacattgtttccaatccactagtaggggaccagagtctaggagaggttacattactgtcccaagtcacagtgaaaaagttataaatctaggacagagagggctctgtccatggaaagggaacttactcagtaaatactgcaaccattgagcttactagtgtccctgaacattctctgctcccccttcaaacacattctccaatttcatttgagtttcaggattgctcaaaatgaggggaaatggtggattttagatccctggacttccgtctcaataaaagaaaacactaatgtaaatagaattcagaaactcaccattcttagtccagaataccttgatgcttctttcactttcttatttccctgtgattctggaaaagtaatttcgggtgtccaggtatttgttcctttgattctaagaacatacagtccagacttaatttcttgtatgtctttatgtgtgattatgactttgattcccctcaagcagtagagaaaaaatgaagtcttgattactacgcgtttagtcgcttgctaagacatagtagatttaatattagtttaatgatataatgtgcttggttataaaaagggtagaagcttactcagcccccctccccagggaacagattctggctgtaatagaaaataacggaactgtatttacaccctgcatcatgatctgtctttacttccttagggattcaatatttttactcaagttttcccttccctctagggctcctacataatgcaaagcagagccagaaataaactcccacatccccaccaccttgatctctgaagggaaatcattgttttggtttttttctgtctttcttccttcatgctgagcggaaatttcccataaggtctactttgagacttcgtgtttttatgtaaaaactttgaaggaccatagtaactcacttcaggtattgtctctcctaggacatcaccaaaataactttgaatggcttacatcacttctaaagaaggtttttactttctcaggtttatagtttctgaaatagggatactaataataatatctcattcactgggtggtggcaattaaatgaaataagtgcaatggtaaaaacagcccctggcacatgacaaataatcagtaaatgtcaactattattatttgtgttctcataacttctggcagattctccatcaggatttttccccttgaatttttgttttcctctaaaaactataagttctgtaaagacaaagatcacttcagacttgtttactactttgcttctaatgctaagtacggagaagagtacatagcagcccctctttaaaattatgaaaagtatgttatctggctgaaagtcttcagaatcgaatttccatggttctcagatgcttagaggctacaaacacaatgacctccatgcctttctctcagccacctcacaagttcagacactctgtaggttttaacggaactgtgctattgaattgtagtagcttctaactgttattctagcatttttccacatagttcctcttgtttagccacctattctgttgctaaaataagctctggaagtgcagctctgccttccctagttttagaacttccagtggctctccattacccactgaacaattgaagctatataataaaagtgtaagtttcaaactaattttcagtctcagttaaaattagcaaggaaattgagtcagacagattatagctgatgagaagccatgaaagaactattctgattaattgaagtattttgagcacatatgatattgtgtaatttcttatttttctcaacaaatatgggaaaaaggatattggacaatgtttatgtttcagagtctgtaagagtgtacaaaaaaacaaaaaacactagccaggggagattacatttaaaatttaagtttaaatcttcacaagctctccttctcatcataataaattatagtgttttctcttcaatatttacctaaaacaattaagaatgtactccacgatgttcatctgtaaaaattatatgttttatttactttctaagaaatgtaactttcaacccacattatcagttagaaaaaaatttgcttcaaattacagaatctctttaaaataggagctcatttctttttttttttcttggtcctcttgttttattgttttattttatttatttatttttttttattatactttaagttttagggtacatgtgcacattgtgcaagttagttacatatgtatacatgtgccatgctggtgcgctgcacccactaactcgtcatctagcattaggtatatctcccaatgctatccctcccccctccccccaccccaccacagtccccagagtgtgatattccccttcctgtgtccatgtaatctcattgttcaattcccacctatgagccacattttcttaatccagtctatcattgttggacatttgggttggttccaagtctttgctattgaaaataggagctcatttcattcacataacaataaatctagaggcagagtgtcccagtgttgattcagcaactaaaccctctcatcaaagacccatcctcatccattccactgtcctcagtctgctgaccttattcctcggggttttcactttatgttcacaaaacatctgttatagctccaacaatcacctgtatccaaagaagaaagcaagaaaacaatgcagaataactctcctcacatatccctctctttttattcggaggtaagtcttctccagaagcctaaaaatgacttccctctatgtcttatcagtcagaaataaaacacacagccaacctcattgcagggagaactgtcaaatgattatctcttattttcagccactatcacgagagaaattttgtggcgttagaagggaaggaacaatgtcttctatagggcaggacaccaacatcttctacctcagtgaagcttgtgaaagatgttcataataggaaattgtgtttgttcaatttaactatagagtatacttgttatttgttaagtgagttactctctgaagctttaaatcaaatcagctgccctagcatattcaaacaattataaaaacatatatgtgaaatatatgtatacattgagttcatatttacccacacagtccttatgtaattaaaagaaaaaggaaatcattgtatatttatagagggttttttattagccaaaaagccgcagactctctgaatgttttcaaactcctcaaaataagggtcattcccaaaagacattatcaagaaagtgaaaaatcccacagaatgggagaaatatttgcaaattatataatcttaaaagacctagtatgcagaatgcctaaataacacttaaaactcaataataaaaagataaaacactcaattttgaaatgggcaaatgatctgaatagacgtttcaaagaatatacacaaatggccaataagtacatcaaaagatgttcaatatcattagtaattagggaaattcaaatcaaaaccacagtaaaatatgacctcacacacacaaagatggctataattttttaaaaataataaaaccacgtgttggtaaggatgtgaagaactgaaacctttgtacactcctggtggcaatgccaactgactgcaaccactttggaaaatggtcatgcagtttctcaaaaggttaaacagaattactgcttcactcagaaatttctctcttagttatatacatcagagaaataaaaaac

SEQ ID NO: 397 - DNA, 8060 bp, Homo sapiens
tctcagcctgactttagaactgaatttttgtccaaccaagggtgtgaataaatgcaaagacatgacttgttatttgttaaggttgtggggtgaggggggtggtcacacagagcattgtctccttgttgttagcagcgttcatcttcctacttgtggggagtaacagactacttttggcaatacagtgctcaaaagtgtcaagaaaaaccctgcaactcaggacccactggattctagagaacaagcgtctcttttctggattgttcttgtttatttggggggtaaatttggataagaatcaaacaacttgtagagagatccacagcagaatcaagagcaagcctgcaaacactgtttctttcatttggcacttagcaagcacctactatgtgccagacactgctccatgacccacctcctctctcaccatccactgggcaaacaacagccataggttgaattatgatgtggaagcaaatgcaaatcaacttcctccttcatataaacaaacaaacaaacaaacaaacaaaaacttgtgtcagaatgtttttggatactaaacatcaaaactcagccaagctcagctggtaggttttcccagcgatttccttggtctgagcatctcttaactctgcatatcggtaaggggaatggtattttaaaggagtgactctctagaggttgaatggcctctgtgaggggtcgatcacaggggattggggaaggggtctctttaacaccaattccatcagctctgctagctgatgggaaagcttgtcctttcaccttcggtattttaatttagaagaatgtgtgtgtgtggagggggtgttaatggaaaaaatgtcaccgtttttagagaagctagtgaatggcagggctagcagtcaacctcagatagtctgaaactttgaggggtgctctgtacccctgcctctctcatacaacctagttaataggattctctttaacagggcactagcagaggaatgagctataatacaatacagtcctcagaggactgtagaatcagtagattctcctaacacaaggccagctttccagggcaattctggacagcctatgtcaccgcacactggtttagggctccttgtatatatctccagtgtcctgtgtttcatcccaatctaaaacatttatcatcttttatgtgtctgctccctgctacatggagaaaggagtcatgtcattaatctgctatatccccagggtctggcatatagtgggtgctcagtatttgatgagtgggtagattgatggatgggcagaaataccccttgatccatggtcctctcatgatcttatttcctatctcttggaccaaaatgtaaacatccttcgataaaagaaccttccctgcgttttaggctttggttttggttgagagctccatactcacaagcgcctacagaggaaattaggggctatgtctgaacctgtttagaagggtttcagaacctctgagggtgtggctatccccaccaccttccaaagcaataaacttatccttgtaacttaaggtcttgtctctgttaaaagataattctgagccagatggcatttgccccttatcaatcatttcctttaatggactcacaggaaaaaatctttgaaagttaagaccgaacagggtgagaatccttttacaaataacaatctggaacccagagaggtctagccactcgcctaaggtcacacagcttgttggcacagccctgaatccctatctcgtggtttccagcgtttagcctggctgtgcctccagtggcccctcagggcatctgcaggtgacttcccttcatttgcccaacatttatgcagcacctactatgaatcaggcagcatgctggggcctgtggatagaaagatgaagagccatagtctttgtcctgcaaaggctttcttctctgagctgtacccatggtagccccaagtttctacgccttaaatccgaggtcccccgtggcctgcagcagctttgcctgagtagaaggcagcccgcactaaggctccaggcttatttgggacctggtgggcgacggggcctcagcccctcccgcctaccctggagcttgttgccgccgttaccactgaaccagtcatgccagaaagtcatcacgatgatttcagaactgtattgtgatttatgcaaagcgcgccgataattacagccgggcgcacagaacacaggatgcatatgctgcgggtgtgtgcgcgcagtgttgtgcctttcgccagggctgaatggggtgtgtgtgtattccgtaggcatcttcttgacaccatgcttgatcggggactggtgacaggaaaaagagggaagatacccattttgattttgagacaatttgatgagccttgggagtattttccagaagttttggtgcctacaaatgagccagcctggcaggagcgttcgagagtaggggaagaggtggtttggagcccaggaaagccatcgtccagcccccgcacaggcaaagcaattagtagttctccttctcgaaacagacccctaaatgcttcccctgcagacaggcctgggtctagtcatcaccccccacactgccctcatcttcgccccagataaattagttccacccttgaagttctttgtcctgaaccaaagaaccccataatcgcgtccgcgttatgggggtggtggtggtaggtggctgaagcaagtggatttctggcgtgaaccagaacctgaggattccaaacggagcctggcatcttattgtgtttctcaaatcctgcccgaaattcctcccctctctgggcgccgagttcgagaaagcgctacgccgccggtcgggctagctccacaagcggctgtacaagttggctgtcaaaaaacgctgatttctcctcctgtcacctaataaacccctacgcgcttatggcctcgtcccacaatcccccaatctcgtcccaattcgaaaaaccgaggaggagggaataaactgagagataaagatccccccatcttgctctttccccgggaccccagccttggtcgcggcgccccactaaggaggacacaggctctggtgtgtgtggtgtgcgagaccccgagctcgaggccgagccaaggctgggcagaaagttgcaatcacgtgctgtcggagcccactggagcgcacagcccgctccccctgggacgcccaggcggaggacctgctgcgccctcccagggctcgggggactccagcattcacttgcacgcacaggcgaactctgattgaaagcccgggatgacaccgagtctggagaaagagggaccggggggtgggctggcggaattgcagagcgccggccacagctcccctccccgcgaacgtcgagcggagggcgggaggtgtaacctctgacctctggccgggtccacgccctgaggagggactggcaagctcttgttcgacaagttcaagctgccgagagagcttaaatagaattaatctcttagagatcggggatcatcgctccctcggcatgcgctctcccagcgccgcgcacagagcaaggcgcgagagagctcaggaatcgcgggaaggcaagcggaatggggagggggtaggggatgagggcctctcttcactattcctccgcccggagagcgggagcccgcaacgcccgccgaggacgagcggcgggagggaacgctctgccctccagccgccccggtgcagataatggaggcgacaagagattcgctcagcgtcggatgggccagctctgcttggggaagctggcggcatcctcccctcggctggtgcccaaacccactgcgcgaaggccgaaggaacgcggaacctccagaagaccccatcctcagccctgactttccgtagatatgtgcaaaatgagtaaattactcacctcgggccagatccaagttttacccaacagaaggggcaccggaccaagaatgaaccaactcacatggccatgtccggcgcgcacaatcacacgccagcacacagccacccaatttcttccgcgaatctatctggcactctggagagagggggaaaagcgttttgagaaagccccgtcacccctccccttccttcttgccgtgaaatatacgaattcatttttattacgagccgcaccgtcctcaccatcacgcacgcacagagccacactcccatattcacactttctaactcgtaagctccgacagcgcctgcattttctttgggagccgcttggaggttcattaatatcattagcatttaaccccctccctcttcccatcccctccccgcacatggctgacgtcagaccccgccaggagttgggggaaaagctaagtgggccagggacgccctattcccctccccgcggctgcctgtcagagcgcttctggagatattacaggggacccagcccgcagcgacaggcacaaagtcacggggtaatgaacttcggggacccttcgccgctgcgtgcgcggctctccccggaaacccggacctggccgcctcttccctcggaagatttcccagcaatctagttttcccactctgcgcttgggttccggcagcgcggagcccgtctgcctctgagactgcggtagtgttttccttctttccttgggagaccagcggtcggcagagattgcccacactctgcatgcctatgtagagggagagatcgaagactgagtgacaggaatggggaaaaagagggatttcgctccgtaggaaggccattttcgtgtctccatctctgtctttcaacatccctctcttgctgttcttccttcttcctcagtcttcctgtccatctctccatctgtctgtccatgtgtgtgtccatatcaagcagcattcccagcagctgcggttttgcaagagccgggaagaaacttaaggatgcttaaatttccactgttggacgaattctgagcgcccagggagcagcgcagcgcgcgactgacacccacctgtcccgcccaggagccttgcaggctggagggcagctggagagcggcggcgcccggcggcgaggcgggcgctgccggccgggactcgggcagcgcccaccaaccgctccgccccgggacagccagcatgagcaagccagccggatcaacaagtgggtacctctcgggccgccgtggggcctaggcgcgcagcctggggcgagcgagcggggaggctgggggaggtcctgcctggagcgctgcgaatctgagcccctgagagggattccagcgggcgtgtgcgttcggcccagacctgtagaccgtgagttggagcatttcgtggagaggggagagccgtttcgttgcctctggattgcttgatcccccctgtctggtgcggtgagaaggttacgacccgcgcagcccaccagtcggatgagttgtctccatttagccgccaggtgctggatgggggggccatgggggcgggaactgggccgcagctccaggcggtagcacaataacacactcgctcaaaactccgagctccagcgcgcaaaagcaactctgtgcaaagcggattttgaatggaatgctttgcaccccgtttctagctatttcaaataatcctgcaaactgggaagcagaaacaatttaaaagtcacattttccttaatcctaaatccgcgtaggtcataactggggaatttaaagtatggcgaaccactctagcaaagagaggaccaaatccctaatcccaaggacttttcgagccggagcccagcagaggcaggagtgcgcggcctgctccctccgtgcgcttctctccttcctcgaacttccttagctgccggctctccgaacgccaggccgcagctgacctctcaccaccccgagactcacgagcgcagggctaagtgtgtgtgcgagggcatttgcttgcaccctgcctgcggaacccaagaatgtgcaggcccgagccagcgttgagcaggcgcggtcacggtgctcagatctcccgggggcatttcagttcccgccatccagtggcccacggctgcgggctccagggtctgaggctggggactaccgttgccgccgcagtccccatatcccgaagttgccttgctgcttgtgttgttttcgcagatagcatttttggcgctctgtgcgttccttccctccccctccccctttcactcgccctcattgtcctgagtctttgaaagttgggagaatcggagatacttctgaggactggtaatgaagtctcacttaagtgggatgcaattcccgccctcctacccccctccaagaaggaggttgtgttttcattttgttttgctttgggtgctgacctttaaaaaattagagcaaaatgaacgtgaacaaaaagaaaaggagaaatgtttcgagctggggcagagggagcagagaaggagccctcaccgcggccggaatgcagagcggaccctggcccaggactgggtttccctttaggctcgggcctaccctggccctcgctgttggaatctccaggaggtaaagcgacctcgatttttgttgcccgcattcccgggcgtgagtgtccttcccaggaggctcaggaggccgtttctgttgcattctgagcctccgttgcaaaaactgaagcccgtgggtctcggcaggcctcctagctcgctcgccccgggacaggccctcgcctacacccctggaagtaaggagccccgggctctttcgtccttttcggggtgtggagcccctggggcccttgaaaggtgaggcctcagaggcgagggaggggtgagcggggagctctgcccgcctgcggctgcgcccccgctgtggactaggaggcaggccaaccctccggactttgggggaaaaaccacagcgggctccttgcggaaactttggccgttctaacttgccaagagcctgagtgaggccttggaagcctccagccccggctcaggtcgggacgcggctgctgagctttctcaggcccgcaggacagcggcccccgccggtggcgccgctgcatttaggccctttccagaccggtggcggcagccaacccgagacttgcgtccctcgggcccggggcagctaggaggtcggcgcgcagcgggccgggtcaggactgggtcgagcagacagagctgcagcccccgccttgcccggcttctcgcggctggagagcagagcgatgtcacccggagccccgcctgggtggtaacgagaccctggccagtcacccctgcagcccagactaacttctttcaacagcctctgatggtaattacagtaatcgaagctgccatatatctttaggcaattatgacacacaaaaagccccgaggggaccccctggcgagggaagttaagaacggttttccagcttcaggaaactccggctcgcctcacgtcggagctcgctcggcttgctaaatgagaggagctttgcaacggggtcaaccagcttgtctcgtgaccccaagtcaccttaacgtggctgggtggcggagtctgaggcacaggcccgctatgccccggaattttcgcgtccctccctcctgggccccgccccagcccggttgcctgtttctaatctgccccgggagccgcggctcagaggtctgctcagaggcaggactcgcactggtggtggcctagagggcaacagtccggaagctcgggcgggggaatccgaggaggggcccccaccctgcactggtcttccctccaccctcatcgggttctccagagatgttgtcatgggcctcctgtccggatgggaagtggggaaaaagagaccccaccactgctcctcccactcactcatcttggcatcttcaacagtgccacagggaagaggacagctggggtgacagtactgctgggccccaaacgtggaccctggagcggtcagagggcgcgtgttaagcagaggatggttgtaagatatggaaaccaagtttaccgcttccagagtgagtgcagtgcagcggagctccagacccggttcctgagcgaccaggaactcccttgggcgcagtgacaggcccgaaggagtggaggacaagacccgctgtgccct

SEQ ID NO: 398 - DNA, 8060 bp, Homo sapiens
tggagaaaagactgagaaattgaagtaaaatggaaaaaggatgtcattcaatataaatatttactaacatcatcccagtctgaaaggtcagtgaattagcaggagatttcttagcagattgttcccaaaaaagtaagaaactactatgatttaatataaagaaaattaaactaggaatcctaacaatgacttgggtttccatctgaatctaccactagctgcttatgtaaccttggcctagctaatctaggcctctaagtccccagctataaaacagaaataccttgtctttacataactcaaagcactgttgtctggataacaaaggtgaaaaacctttccataaaactttttacagatgtaaaaagaaatccatgggcaaagtattaaatcgggtattgtacagcaatatttaaaatggtctaagacatacatctgtcagcttttgaaaatttattttctcatcctattcacctttatacctaaaaaataagtagactaacataactttggaatacattatactaactggcttaagcatataagtggtttacttgatgctagtaaataaatggatgcttctaaaatacattctacttgagaagttcaatattgaaaatagtaactgacttcttgataataactgggcattcagagcccaaatttgtacagtgaaataactattttgtacctttttagtctgagcataaaaactagttctcattttatatagttttattgtaaactgtttggttggatatccttggtctatacaaccaaaggatggcaaaacgtgagatgataaatggataaaaacaaacaaggtactcttcctttaattcctttaagattactgaaccattacaaaatacttattttccactctagctcccaaaggacatcctaagagagatttccattggctatcagtatcaagaagaaatccagatgtaaaattcctatgcatttttttttccctaaatcgcctcagtttcagttcagaaaattggacttttaatcttcgtgataaacgtatacaacaatctcattaactatatctaattaattcagaattagtaataattttgacttacaccatgtcaaattgaaaatgctttattaaactagttatgcaagtgggaacattactgaaaagactcttggctcagatatcttgtaaaaaagcaactgcattttcaaaatttgttcaaatactctcaaccaccaggaagagacagaaaaagagcgactaacttcttgaaaattttaaaataaggctgcttagccttagtctgcaagtaaattaaattgtgattctttattttgggaggtcacaatcatctggaaatcgatgaaagctacaaacaccctaggaaaatggacacacgcacaaaattttccatataatttcaggtgatcctaggctacctctccacagtctaaagtggagagaaaaccttggattctgttagtcttcacttccactttcgatttttgagaccattttttttttctttcctgctattaaagaatggtgtctgaatgaacgatattcaaaagccagagaggataaaaacactataatactgctaagtaaaaaattcagggatataccctcttgcttaatggcttaaccattcctcatgcttctcctagatgagtggttctcaccctcagctgcatactgcactcaaatggagagctttaatcatttatacctgatgtctgggtgaaatcctaattttagtgacctagacatcaggacttctaatagtttttagtttaaggctaataagcaaccaaggttgcaaaccattgtcctagacagtcctggtgtttccaactcatgtgaactgggtgtttctaaattttcagaatggagggagggagaagatggagtgctaagatttgaaattcaacgtcactgctttaaattgctggtcttgagtgtggcctaacagtgaataccctgggcatcctccaatcgcctggctgagctatgaaacacccctcttttctgtagacaatggttctgcataatgctatgcaatttctgagaattcctaaaagttgatttctatgcttaaacagtagtcatttgaatgctttatttagttggatcatttccacaagaaacgggactgcctgaggtttgcagatatccatgactttccccaacataaactgacaaatacgtggaatgttaatattgttttaaaatcactagcaaagggccctgaaccatctccacaaaagtgcctcttcagcttatgctgcaccaattatgggcccaaaatggttctcacagttaaaccaacttttcctgaggccccctttattcgagctcatataaagaaatccaagagagaattgctgtcttataacaaaatctacatccagtaagtgttcagggcaataaaagttgcaaggaaaacgataacgacacatgaagagtgaaggttcttcagttctaaacttggcttttctcccaaatcaaaccagtgaagaaagccgggggtaaaaggaaccgggtagctgggagacgctgcagttccagccaggaagccagcgagaggtgcagaggatgggtgggtgtctgcacggagagccccgaacaggcccgggggagtgacgggggacgggaacaactactcggtgcagatgggagtccaccgcaggtggccggccggggcacccagggcttcgaggaggtagggccgctctccttagaggcagcagcgggagtcccagcgcggcggtggggccggcccgagggcggccagtgacgccggtagcgcccctcctcagccgccaggccctcggcaggggacgccgcccgccccgagagcacgtccgaggcggcggccaggccggctctgcgaaggcctcgcagcgggcgggcaggctgcgggagcgggcggcgctgacagctgcgcaggcggctactcgcgcggcgacggcacggggctgcgggcgcggcgcaggccaggccgccccaagaacccagcccgctccccatcgccgcccgcaccgcccacagcgggaggctcagcgctccgttaccttgtcgcagtagagccccaccagctgcttcatccgccagtgtggggcggtgaagacgtccacttcttcaggaaagggcgccatcgccactgcctcagcctccgcctcagcagccgcggccgccgcctctccatagacaccctcgccgcggggcagaggcggcgcgcccccttgcgcatgcgcccgccccgtcggcgcgcgcgcccggtcggcttggccggcggggacgcgggggcgcgcaggccgccgccatgcgatccctgcggcccacgtgaccgggcgcgcgcagaggctcgcggcttctgcctcccgcccccactcttttcgttttttgtcgtcttcataagccgcagaaggaacccaaaccttttccctgtttctttcactacatgaaagcacagtagctgagggtaggggaaagtcgttgcagtggcgctctcggcgcttctcccgttgctgccctgcccaccacggccttgaggagaggcagccaagcacaatggccgcggtcagggccgcgagctctgcttgtgcccacgccccgacgcctgcttggcctgggtgaccaatgcttctggccaggacctccggagctgcccttcgcctccctgcgattggcccgtgccagatttttcctggggccgagcgcagaccaccccggccgccactcaaaggccgggcctggctcccacccagcggttggtgaaccagagctgcgggctctgagagcttcggtcccgggcggcagcccacagcgggcgcggggcctgggtgcgaggggcggggcagagaccgcgagagagagttctcgtgaaattcgggagactcaacgtgggggaaaaacagtatctggggatccaggtgcggaaatgcacctcaagtgcaggaacgcgggtcagggataggcccgacgggccttgggggtggggagaagggtgaataatggaaggttggtgcgggaaagaaccttggtacaaatcccgccattttaagcggaggttcggagagaaaacaaggtcactaacccaggaaaatgtctgcctctttcccataaatcgcctggccctggccacagacctcctggagactctgttctctgctcacgccggtcagtcttagattggttggctggagtactgctggacagatagagaaataggagaaaacagggaagcctgagaaccttgggaggaattgttatttgcttaatggccagaacctccaggagggcaagaaccagatatgctgtgttcacccttgttctctattatctatcacagttgcaagacaacatggggatcagtaaatagtcaacaaataatggagtagaagaaggtgagaaagaactttgcagtggaatgcaccctatttagttctaatcttatattactatatgctattatagacagtgtgaacagtggttaaaccacagactctggaagttaagattcctggttttgccagacactagctatacaaccgttaacaagctatatgacttctttatgcctcagtttgctctgacatgaaatgaagctaataatacctacctcagaatctttatgaggatttatatatttgaagcacttataacagtaccgtctgtaagctagtaatacttttttaaagcaactctatgaggtagtgctgcaggaaattaagtcttcaagacattctagtagttgcctagggtcccacaaattagtaagtcaaaaatctgtcatataaatctggatctgacagtacccccagagtcattgcattagttgggatacagagatggcttattcacagtctgtcttaagaagcaggaataaggcttaagaaatagaataataataaaatatttgataaagattaatttctctcttcctccttctccctttcaccccgtttctcgttcttttgccaggactttgcctctatattttttaataacctccagagagcattttcttatttaccctctatttctttacctcatactaatctttcactccagctatcttggaatgcagaatcagacctcaggtgaaccagttatatagagaaatgagctccatgagaacatgcactttgttttatcctcagcacttagaatgatgtctgtcataaagtgagtattcagtaaatatgttggaaaaaagaatgagggtagttcatagcactgtgtaatttcctcatttttactaatgtttaatatgctatgttgtcttgtccaatcaactgtttgtgtctgtgctgttcactagtgtatccatctgtagaaccagacacattaaaaaggtatttggcaacaacaacaaaaaaagtccatccacacagtttcactgtaacccagatttgaagctctataatcagctgaaaagtagtaacagccactttggacactggccatttcaaggaatttgttttagatgacaaaatgaaagaaagtgattttaaaaataatccctgtgagtaatttttcccatggaaagctattaacattagctccatatgctgaattatgtagcaattaatcacctgatatatccaaaataaatgactgactttactgaactttagctctaaagaggtcattgatcagtgtagtatcattaccataggttactgcaactacagcagatttgggagggttattaagaccaaggttgtcactttacctctctgtgagacctttttggatgtatgacagcagataattccaacagaccatctagcaattgaccaccacaagaagtctgaataaggcatgtgaacagagcagtgaaaacccacattgtagaataactggtagaattggtcgtttctcttacctactctcattctctctctggcaacctaaaaatataacttattctgttatcaataggcctcttctatagtagtttccaagcctaattttgagaaccctggaaagggttattggccagggagggtcaattctaaggcatttcactccgtttgagtatgtgacacagcactttccctaataggggattagttgtgaaaacaagcaatgaaagaatgtttacgttttgacccagttggaatcatagtcctcactcagtaccagagttgatccttactgtccatcaaaatagtcaatcaacaactgctgcagcaggctgatttaggaattgctgtggtttgaatgtttgtcctttctaaaactcatgctgaaacttaatccccaataaggcagtattaagaagtggggcctttaagaggtgattgggtcatgaaagttctgccctcatgaatggcttaattcattcatggattaaaggattcatgggttatcataggagtgggactggtggctttacaagaggaagaaagacctgtgccagcatgctgagtccctcgccatgtgatgtcctgcactgccttgggactctgcagagtcgccaccagaaaaaaggccctcatcagatgcagccccttgaccatagacttctcagccccacactgtaagaaataaattctttttctttataaattacccagtttcaggtattctgttataagcaatagaaaacagactaagacaggcacatacaggatgatgtcttaatctactttctcgatagccacagagggctttctggtagaagtggcccttaagttcagcattaaatattaagaaaaattatccatctgggactccagagacttaattttttcatattcagcgttaaactggacacccaatatgcagcaggagcttgagatataaagttgaataaatcctgattactgttcttggaatttcccagcttttaaactcagtttcatactatccaccccatccttaatcagctgcagtgatcaatgtttcttcctcattaatttcagtccctcctgtgctttaactaaataatatatttaatgacaaaaaatcagaagaatgtcataaatggaagggtacccagtaaaataattaatttcttagcagttttaagtacctgacattatgtaataatgtttatctacattccctgaacaagtagtaggcatacatagtaggcataaaatatttcttgctgcatgaatgagaatttgaaaagtttttacaaaccaaaatactcctgttattcagtaatatacatatatggtttttaagaaaaactaatccaaacaagctatatttaaagtcctaatttcaacaattgttaccctcctttaaagggttctcattttgacctcataagcaaaaattgattcctaaactgggtactgggtaagattcagttctgggaatctctttactcagatttctaattccttctaccaggagaatgtgagctgcaccgcaaactacgttaactgtccaaatatagagtagtcccattccttagatctccttttgaagagaagtttagataatactaaaatcatagtctctttcattttaaatctggagatataatgtgtatagtggtccataaagtttccttgcaaaattttcagacagagaagagccttccatttcccaaatatacctttatgtcacctaccttgcgtcatttacctcttagtaaatattgccaagtgaacaccaaaatcttgattttcaaccagaggctctattatgggctgacttgtagggagaaagaatggttccatgtgtatggcctgagggaaaggtggctactctcagggacaacttgactcagctgtttgcaccatgtagtgagaaagtatcacaagtttctggaatggaaagaaatgataagttcctgtaaagtgtcagagttacattcattgtagtgatgaaatctggcaggcagttgcttaatccctgcctacagagaggggaaaaaaaagtattaggaaagtatcagttctgtttccttcctccctacccctgacatttttttttttttttaaagagggtttcactctgtcacccaggctggagtgcagtggcacaaacatagcttactgcagcctcaaactcctaggctcaaatgatcctcctttctcagctg

SEQ ID NO: 399 - DNA, 8060 bp, Homo sapiens
ctgaggtcaggaattcaagaccagcccccgccaacatagtgaaaccccgtctctactaaaaatacaaaaaattagttgggtgtggtggtgcacacctgtaatcccagctgctcgggaggctgaggcaggagaatcatttgaacccgagagacggaggctgcagtgagccaagattgtgccattacactccagctgggcgacagagtgagactccacctcaaaaagaaagaaagaaagaaagagagagagagagagggagagagaaagaaagaaggaaagaaagaggaagaaagaaagaaagagaaagaaagaaggaaagaaggaaagaaaggaaagaaagaaagaaggaaagaaaaagaaagaaagaaagactgacaaaatacaaccatataaaatgctcaattaaaaccacaaacagctgggcgcagtggctcaggcctgtaatcccagcattttgggaggctgaagcaggaggatttcttgagcctaggaatctgataccagcctaaaaaataaagtgggtccctgtctctataaaaaatttaaaaattagctcggtgtggtggtgtacacctgtagtctcagccgctctagaggtttcagtgggaggatcacttgagcccaggagtttgaagccgccgtgagctatgatcacaccattaggttccagcctggattacagagcaagaccctgtctctctctctctctctctctctcacacacacacacacacacacgcacacacacaggagaaaaactgtggcagatataaataggaacagagaacaagggcaacaaatagaaagcaataacaaatacggtagatattaatccaactttatcaataataactttgaacatcaatggtctaactgcaccaattaaaagagattgtcagagtggttcaaaatatgagacccaactctatgttatccacaaaatcccactttaaatgtaaacacgcatatagataaaaagtaaatgaatggagaaaaatacatcatgctaacaccaataaaaaaaagtaggattagctattttaatttcagacagagcagacttcaaaacaaggaaagtttgttggaataaagaagagcattatgtaatgataaggggtcaattctccaataagacagaacaatgcttaatgtgtacgtgcttaacaacagagcgtcaaattatataaggcaaaaaactgatggaactacaaggaaaaatatatgaatccattattatagtggaagatttcaacacccctgtatcagatatgaacagaaccagcaggcagaaaatcaataaggatgtaattgaactcaaccacaccatcagtcatcttgatatagttgacatctatagactattcaacaacaacagaataaacattcttcctaaacatgcaaggaacattcgccatgacagaccacattttgggccatagaagacacttttgtaaatttaaaattatataaagcatacaatatctactctcagaccacaatgaaactaaactagaaatcaataataggaagatagcgagaaaattctaaaatatgtcgagtttaaacaatacatttctaaataacatgagtcaaagaagaaatctcaagataaattttaaaatattttgagctgcaagaaaataaaaacataacttaccaaagtgtatgggaggaagcgaagtagtgtttagagggaaatttgtagcattgaatgtatatattagaaaagaagaaagacctaaaaatcaataatctaaacttctacctcaggaaactagaaaaagaagagcaaattaaatctaaagtaagcaaaagaagagaaataataaaagttaagcataaactggtaaaactgaaagtaaaaaaatcagtaatcacaccaaaagctggttctttgaaaagatcaatgaaatcaatgaacctcttagtcacgctaagaagagagaagacacaaattactaaaatcagaaataaaagaggggacatttctacagatgacatgaacattaaaaggataataacaaatgctgtgaacaactatatcccactaatttcataacctagataaaatggaaccccttgaaagacacaatctgccaaaactcacacaagaagaaatggacaatctgaataaacctatatatatcaaagacatcaagtaaataattaacccataattaagtacccaacccataataattccctggaataaactatgactatgtctgggttgttgtttgcttactctctggatggactgaggcttttccttgctagggagctataactccacacactgatttcccccaaactttaggaaaagtaaagagaactaacagagtcctaaaactaaaattatcaacagtttcgaaaaacaaatttcatggcccttcaaattgccattagtcatgattgattgatgacaataaatcaaccccttctgggacccacagattatctcttcttgaattaacagcctccccctacccatgtatttgaaaattttacttccaatcctacgttctaccattacagagtaatataaataaatgcttcatgagacttatgctacctgccgaattatccctagtaggttcaagtgcatttccaaaatacttacctaagcagactttgattgatctaaaacctggcaatttggtcctttggaaaaggaaccagaataaaactgtccttgggcactggtggaaagaaccttattgggtactgttagcaattgaggtagtggtttaaactccaaggtaatgatgttggatccatcgtttccaactaaaaagacataccactttcttctgattgctgggcatttactctaacagaagacataaaactaaagattttttaggaattcttcaggagctaatatctggagatgtggactgcttttgcccaagacaaagaaaccagactatttttctgtttttttctaattaattttctaatttttcagctctaccactaatcttgccttttattgtattttgacatcctccaatgaaccagtattggtagggcaattataagggtacttagataaaaacaaaaatgatctacaattgcttctgtagacacagggtctaggtatgttgcccaggctggtcaggaaaaaaatgatctacaaatttcaatgctttaactgttaaaagcaacaacttactaatgacttatcttaccactttttaaaattcattaacctaaaaaacataatttctctgaaaagagagactttaatcattatttgagtatgaaataaaattaagtatcgtttgaagggactatagtcgagcctcctaatcatgaaatcttggcttccttgagcttatctttccattcattacttcaacatttattagaagcctctatccatgtattaactcgatatttactaggagcttccatcaatttattgaattcatccatttattactaatatgtaccaaataatgttagacagtaggatatgaggacacagatctatggtgtttcagttttgtggatgcaggcaaataaactataaagggaagtaatatggtactgagtgctctgacacaggtatgaatagagaatgtggggataggtaattgtagccatttctttataatgtgtgtgcttggggtgagattcaggagaatactacggggtgaaaacattggtggaacagaaaaaaatttcacaaactaacagttgcagaatggctacagatcatatcggaaatgaaccacacacttctgtatctgtagtcctctgcgttgtgaaaagattgacttttttcaaaacaggtcaaggaatttggttatgtcaaacacaaagttgcctcttttttccttctgacatggtaaaagaaaaaaaacaatcccataggatgtgtttggttggccatagtatattgaacttatcttaaccgtctcaaaacgcatgtcaaggacaccactgagacttctgagtaccatttaaaaaattgggtagtctggaagtgttctaaattggaccgtttggggtttctgttagggcaactttcccatttacatcttggaacacagccttttgaatatagcccttcgggattggcggggagaagggaccgcgatggaaaaagtcatcatccaaagaatgaagagggaggatccaacatttaggatattttattgacttgctaggcgcgtttaccttatcttcgtattaaccccattttcttcattaaccaattgatgctgtgagaagctatgtaacttgacgagcagtgcccagaactgtttttttttttttctggactcggtcttttccactcaaaaccaacaaaaaaccaaaactcgttcttttccacatcaaaagcaaacaaaaaaccccaaccccaaccccaagagccccactctttcaaaagggcttctccggatcactaagtcctagaggtctttggctaggcctgggtccgatctaaataggaaggtaattctagtgttccgcaaatccttgccgaattccatcccggccaaagcagggacccgggggagcctctggtcgcacccgagacagttcgttaaatactcagtgcacgtgctggggatggaagtgctgacccactgctcaggtacgcgcgcacctgacgccgcttggtgcgcgccgcggggtactgggtacgtgctccgcgcgcgcgcgcccggcaaagttccccgtacgtgcgccgtacgtgggcgcggtgccccagcgctcagcgtttcagcgagtgagtgggctccgtgcccagctgaagtctgggaggggcacttttccaggcggtcgcggctccccctggcggcggatgtgcctcgctggaggggcgcagtcaggcgttctccgcgggcagccggcggcggggccttgccttacagcgcggggtcctcggcggcctgggtggctactgcccctgctgctgtcgtaggcgaggacggctgttagtgctgctgctgttggttcgtcgcggcggcgaaggaggaggaggaagagggcgaggcgacaagagaagaaggaggcaggcgcggcggcagcggcggcgccccgagccggcggaggcgaggggggggaagatggcggacgtgcttagcgtcctgcgacagtacaacatccagaagaaggagattgtggtgaagggagacgaagtgatcttcggggagttctcctggcccaagaatgtgaagaccaactatgttgtttgggggtaagtccggcatggctgtggcccaggggtggcagggcagagttgggcgcccccaggcgacctctttcttaacccctccccccgtttcccctggggatgggataaaacgggtgttcggggaaaagaaagtttctctctagagcagaagttgcacttttagggtaaggaaagaaggggcggagctctagagcagttcatcacttaaaatttttgagaagcccaaaggaaaggtaccgtgggagtttctgacttttacagttaatttttatcagtaggtatgtgtaccagcgaagtgtgggactggtgcgcaagggatacctgaacataggtgcacaaaggagcacaccgtctggtgccgtagacgcctctttttgttctttattttttttttctcttttccaggctgctatgtaactatctccgctggtctttgcaactcctggtttatttcatctcctttcattgttggggtgggggtgattcctgtagaagagaaaagggaatcaaccctgaagttaggaccggaaagaaatttggtgaatttggaagagtcataaaagtctgtgttagagaggtcttcaggagttggtgaaatgagtgagctttacagatctaagaaatagatggtgcgtgtgatttttcggaagtgtattttaaagggaaatgtttgggaatgttggtccatgtgaagttttatcagtttaagtcattcaggaaaacttctagagacggctctaacagtcattaggggcctttttaatgatgtcactgtcattggtgcatcgcttctagaattagaaccttgagctacaacttccctactcattttgtttctttgaatggaagctttatgaagagtcgatgaaaaactagggaaatttagtttgttggttggtatttatttatttatttttgagagggagtcttgctctgtcgcccaggctggagtgcagtggcgcgatcttggctcactgcaatctttgcctcctgggttcaagtgattctcttgcctcagcctcctgagtagctgaggttgcaggcccccgccaccatggccggctaatttatgtagtttagtagagatgtggtttcaccgtgttggtcaggctggtctcgaactcctgacctcaaataatctgcccgcctccacttcccaaagtgcttggattacaggcgtgagccacggcgccctgcctattggttggttttaaaatttttttgtcttatgatttaattagctttataaaatgttgatcaaatgacattctgagtttctggtattttaccctttcgaataatttgcataggtagaattacatgtggttggatttttagtgaatttttttttttttagacaatggctaaggagtacctagggtgtgaagtggttcaatctgaggattaaaaaaattcctaagactctggtttctacctcaaaggaggttaacttagtctgaatagaggagattaaacagataagttgatgtgaaatgctttctataagttgatgtgaaatgctttctacaatagcttttgaagacagcagtcacttctagttggggttatttaggagaaggttccatagaattgtctttggcaagttcacatccaacaaagttttcttgaatgaatgaatgaatgaacaaacaagctttaaagaataggtaggaattctctgggctaaatgatgggttaagtcttccaagatgagtgaactgtatacttaaaggctgtatgcttaaaggcataaagaactggaaagtaaatgtgttgacagcaatccagtgaagccagtgaaaaaggagtgcttatcacagtagattttaaactttttcagcagtttatcacaccaagaaattgtttttattttctatatgtgcacatgcacatggaaatatatacacatataaaacactaaacaatacttactcttcttattgtatgcagtgcattttatttttctgttcttttctattctgaaaatagaaaaaatatggttgttaactatttattgggtttcatagtacaataattgatggtgtgtggtttgaaatacattggtttagaggaaaaatgggactagaaggtagaaaagtaggtttagggctgattatagtggaccatattcagatggattcaaagatatagaaggggaaagtgtagaaggaagggtaggattggaatgaggtaatattagtacctgcattagagatcttgcaccgttagtagactacattgttttatcacaggtagaatagcattttggttttacattattggtctaatttgagggatgccataacagtcatacccctgaaattcagtgttgtgtttactgtaagaatgtgaaggatgttgttcagcagtatcttatttatcaagagccataggataaatttcttttacatttagcaccagtgataattgtgcttcttctaagcagtgtaattgttttctcttatggatcctcttcgatatggatctggttagatttctctattggtaaagcccagagcctaatttgggcctaattctaaaaagtttgtagtaccttagagtatgaattttttgtattttccctacttcttgctttttgtcattgccttcctttgtgtttcttttgtgatcatgacagtctattcattattagattttatactttttttttgttagctatgttaaactcattgttgttagcaaagttgtttatataaatgaatccagcctgaagagttgaattagaattgtcagtaaaaaaaatcttgccttaattatttcaggactggaaaggaaggccaacccagagagtactacacattggattccattttatttctacttaataacg

SEQ ID NO: 400 - DNA, 8060 bp, Homo sapiens
tgtttttttaaattagaatgtttccttaataaattctttggtttggggttattggtttgtattaacttggactctctaggttgcaagtgacaagatgtggactgacagtttaataagctcatgaggagatacattggctccagtaacagagaagtcttccatggggagaatgagtgtcaagtttgtccttcaaacaggacactgtttctctttgtcattctgtgctacattgacttcgtttttcagacagactttctccacacctcagccagttagccattgacagcaataccagagagaaggagcactgtccccaactcccataccaaagagctctgagaaagaattctgattatccagtttccaaaaggaagggatgtggggcagacagaataacagatatgtacaacataggtcagatagaatgtgtatggtcatactcctctcttttctcagaagaggaggtatgtgttaagaatggattatgcacattgtgggcagatgtgtgcttgcacacttggtattctagtgtctggagcattgaatggagagctttgaatccactaatgtttattttactgataagtagattagtagttaatggaacagatacgtgagattgatgtctagtagccattcatgtcatctgtaatactttttgaaaggaagagattagttgtggttgacaatatatattgaatatatagtttggagttatccactgaccaggactaggtggaaatttagctcttagaaatagttgaagaatgagttcttgaagtatagctaatagtggaaaatgcagtataggaaaatggaccatttctttcaaagaccacatggaaaatagatggcagttggggttgaggccagcacctctgtctgtttggatactgttagtggtagacaagaggggtgagaaggggaaagtgagaaaacaggtggaggcaaaatgcaaggataggaaagagaaaagaggggtgctgggagatgacgcccaaaagctttcagtttaattgaagctttagcatctctaggctgaatggtcaatatgtttttttattgacatgttatacttatttggagatatggttattaaatccttttttctccaaaattattctcagttcagatttctaagaagcatctgtttaagtcttaattcagtgttttagataaacttacaaggtttataaacatttttctgtgaatgtccttgtctgttttgtgcttacaacaggagatctacgactgggtaacttataaagaacagaatttattcctcataactgtggaggcaggcggttcaagatctaggtgctggcagggtagggcccggctctgcttccaagatggcgccttgagtgctccctcctccaggggtaagggtgttgtgtcctgacacagcagacgggtgagcgagagtaaacccactcccacgagccctttttgtagcagtgttgatcccctcttgaggacaaagcctccgtgacctaaacgccccccatttgccgcacctcccaataccactgccttgggggttcagtttcaacatgagttttggagggtccaaaccctctaaccttagcagtgagtaagtgcttagtaatatttaagtgtgtgaggctgtttccatttctttctttctcacttgtttcacattctgcttcactacattctaagtttagtaaacaagaggcttaggtattctatatttggaaactaattggattcagctggatttttaaaaatttcagcaggattcttgaggaccaataacacaacagcaggttcctcatgcccgtgagtgtggctttgcttctcccaggctccactctgagggctcgcttccttccagcccgtcccctgcccgcatttctgtcctgtctgtcctcatggcaggaaggatccaggttgatgcaatgtgtttttaaaaaacaccagccgggcatggtggctcacacctgtaatcccagtattttgggaggccgaggcgggcagatcatgaggtcaacagatcgagaccatcctggccaacgtggtgaaacctcgtctctaccaaaaatacaaaaattagctgggtgtggtggcgcatgcctgtaatcccagctactcgggaggctgaggcaggagaattgcttgaatccaggaggtggaggttgcagtgagctgagacttgccactgcactttagcctggcgacagagagagactctggctcaaacaaaacaaaacaaaaacaaaaactaccgcagccaggcatggtggctcacgcctgtaatcccacactttgggaagccaaggcgggtggatcacctgaggtgaggagtttgagaccagcctgaccaacatggtgaaaccctgtctctactaaaaatatgaaaattagccaagtgtggtggtaggcgcctgtagtcccagctacttgggaggctgaggcaggagaatcgcttgaacccaggaggcagaggttgcagtgagcccaaatggcatcactgcactccagcctgggcaacaagagcgaaacagtctcaggaaaaaaaaaaaaaaaaaaacaccacataacatgacaagcagaattctgtccacttttgcagccatgtcaggaaaacacctcagcatggctgctttgttcttcatgacgccctgaggggagccgtcctgctggcctgggcgccctgccatgatctccactcgggtcccagcctccaaggatggaggtggggagctgctgggatgtcttgactcacaggctttcccaccatttgtttcttcccaacagtttactaggagaaatttcagacatggagaaaggttggaattgaataccatagatccaccatctagattcagtacctgctttgtcacatattcgtccatcagtccatcttactattttttatgtatttcaagatagcattttggcttttttttcttagtctgttatcactaaatatgaacctttattctcattaaaataatttcaggcatcattaagcaaatacatagaaagggcaatggccaacaaaagggcctttcaagttcttgccatatggtgggtgttcagtaaatattgttaaattagtgcacttgcattagccctgttagactagccctgtcgctaaacttgaatttgcctttgaggacaaacaattacttttaaaccatatgtttcctaggcgcatgtgatccccagtttataggatggacttgaggaagatagtctgtgaaagacaatcacttagaatttgaaaaggatttaaattatgtattatatattataaaggtatatataaaacattttaaacacataccttgtttttaccacggtgattctctcttgggatacatgcacagcagtgttccaaggagtcagtgtttctggaccctgtctcaaggatcctcttgaggaagagcctgcaagagcagtccctccttactccagccagaatagctttgtcctagtctgtcttatatgaaataaaaatttcatttagggctggtcatagtggctcacacctgtaacccaaatactttgagaggaagatctcttgagcccaggagtttgagaccagcctaggcaacatggtgaaaccttatctctacaaaaaatacaaaaattagctgggcagggtggcatgtgccagtagtcccagctactggggaggctgaggtgggaggattgcttgagcctggtaggtcgaggctgcattgacccatgatggcaccactgcactccagcctgggtgacagagtgaaactctgtctggaaaaataaataaataaaagcttttattttaaggaaacgttttaaaatcatggctgtttaggtaactcgaccagcacacactgccctatgtaagtcttggtatggtggaagagtacccaaatcttaaatttctgagttaatgtggctaaagatgctgcattatcattcttattagataaggagcagtgaacattttaatagcaagcgattcttctaaagatgtgtgaatcttagatgtgtgtgcgtgtgtgtatgtctctgtcttcagtttctgagagtcagtgttcccagaatgaacagtttgtgtatttccacttcttacctcctaagagaaagaagatagtctgttgttgttgttaatgaaataggtgtttgtttgtttgtttttttaagagactgcagggtctcactgtcgtgcaggctggagtgcagtggcatgatcctggcttactgtaactttgacctcctgggctcaagcaatcctcccgcctcagttttttcagtagctggtactacaggtgctggctacaatgcccagctaatttttctttaattttttggtagagatggaatctcgctttgttgctcaggctggtctcgaacccctggcctcaagcaatcctcctgctatttagtctcccaagtagcagggattgcaggtgtgagctgctgcactcaaccaaaataggtatatttcgagtaacttttttagggttgatctctaaatgcaatgtgggcagctgccagaaaccttccctgcctccggaacagaacagggctatcaccgttggtgttattcttcctcagagtagagcagatgagtcattttggtaatgtcttcctttcttccaaaacagccacagccactatcatgtttgtaccagcatgcttagaaagtgaactgtacaccttttgtgtttttactactctgtttgtgtttgtaacatcctcttttcctctccactcctgataggctcgggttatgtatgattttgctgctgaacctggaaataatgaactgacggttaatgaaggagaaatcatcacaatcacaaatccggtaagagaactgtacattcgagtctgattgtcccatgtggacttatttttaacaaatccggtaagagaactgtacattcgagtctgattgtcccatgtggacttatttttaagattttatttttttgtaagttaatcattcaaacccacatgatttttttcctgttgcttatgaaatattgatggtgaagtaagaagctgttatataaatacaggaaaaaagttccctaaagacagttatgtatgtaattgagtttattatgtctgcttattttgtatcttcttcgatatgtttatcttacaattttttaaattacttacaaccttttaggtaccccatagttgtcctggaacatggttcagtgtgtttacccctagcatgataatactgtatctctagaataagtaaaagatgatggtgattttcctaaatgtcttaactgattgatcctatcatcatttttctaagctcttttcctaaatcagattaggttgccagaaagcaatatacttagaccagctccagtggagttagctcagctcccagtggagttctctttgctgaattacaagttattgcctcagcttttattcaaacaagaagcaactctatgtataaaaagcatttctgcatctttaccaaaccctgtttgaaattgtgtacatatacatacacacatgcatcttcaggtacactcatatgtatacatatgtacacatagatacactcatcttcagatgtgtgtctctgcttatataactgggtttattatgccctcccagagaagcatctatgtgatctcttatctcaggttctttctcctggagattgggtacattttgtttcataaagtcaaatctttgtagactattggatttctgttatggtctgtgttgtcaggaagcttagaggcaaacataatattcatttgtgtccaatcttctttgcccaagattctgttacagttttttccattatttctgtgtgatacttgtctcattacatttaattgtcctttttacatgtaactttattgtaactgttcttaaaatatgtagcaaaattatgagatgaacatcatttgaaataatgtaacaaaaattgtatcaattaatagtatttcattgcaggcttatatagatggagaaggaacaaaagcagatagggagaatttgtctttgtaaactgagtaaaacttgaacccatcgttacctgctttcttcacctggctgatttcgtgacactgccctgtgcatgcctgtccttggtccacgcctccgcctctgggccccacactgcaacgtgtctcttctgtgtcctctccctcgtgaccgtcactcatacttaatgtgtgtgcagtcttgggagaggtaccctggagatacaaagacaggaaacctggcccttgccctgtgctccttgttttccagagaggtctgcatgccagtgtttcttactgaatgtttccagaagggaacttgttgtgtctgtgctgtagaacatgttggatcccacacacctctccccggcctcactggctgtcctcttgtgtccctcccctctctgcctcacgagtgttggggttcccacgtcattccaccttcagcccatttctttacactatgcggtctcagatttttgtattgccgtctctgtggtgatgactttaaacctgtatctgcagcttcctcctgtggctccagcctcagaggaggccagacaccttcacctagttttttcacaagcacttcacactgaccacgtccagactcagctcatcacccatgtgatgctcagcctactcctacttctctgtatttctctgtatttctgttgtggcgcctttccattcagtgaaccaaggcccccaaggctaagtcacttaaagccattggtttctctccctagagttttactctgtccagcctcttctctccaccctgcgcttcctgccagcgccctgagctaagctctcatcctcttgcctggaccatgcaccttcctcactggccttgcctcaagcccagggtctgtctaaacggccagtgtggccaggtcattcctcgctggcagcattttctgtcagctgtaggtctgtgagacaccccaccatgggccccatcagacctcgccagcctttccctgtgcacgtgcacaggcacacacacgtgcacccatgtacgtactctcacgcactctctcacattatgcatacccccacacacactcgcacacacccttatgcgtgcacatgcacacacatgcgcacacacctcgcaccctcatacacctctcatgctctcatacactttacatactctttcacgtgtgcactcttacacacacgtaccttctcactctcacctctcatgcacacccacagtcgcatgctcacacacataggcagcactcacacgtgtgagcacgcacacacaccctcttcactctcacttgccctcatccgcactcatgctgtcacacatacacctgcactcacacatgtgagcacacacacccctcactcacctgctctcatgcacacccacactcatgctctcacacatacacatatgcactcacacatgcaagcacacacatcccctcagacactctcacctgctctctcacatccccacgctcatgctctcacatatgcactcacgtgtgagcacgcacacacacctactctctcacctgcgctcacactcacactcatgctctcacacatgcagcactcacccgtgtgagtgcatgtacccctcagacactgtcacctgctctcacacacgcacactcacatgctgtcacacagatgcagcactcacccgtgcaagcacatacaccctgcagatagtctcacctgctctcacacatacatgcactcacctgtgcaagcacgcacacccctcagacactctcacctgctctcacacatatatgcactcacccgtgcaagcacacacacccctcagacactctcacctgccctcacacatacccacactctcctgctctcacacagatgcagcactcacctgtgcaagcacatacaccctgcagatagtctcacctgctctcatacatacatgcactcacctgtgcaagcatgcacacccctcagacactcacctgctctcacacatatatgcactcacccgtgcaagcacacacacccctcagacactctcacctgctctcacacatacccacactctcctgctctcacacagat

SEQ ID NO: 401 - DNA, 8060 bp, Homo sapiens
gggctcaagcagtcctcccgtcttggcctcccaaagtgctgggattacaggcatgagccactgagcccaggctcctttatgacttttgttaatagctttgtgaatctaaccaaatgggattgacatagactggcattaatactgatgacaatcaccttttcccaagtggagagcacctctgattctggtttactacagaggctctggcttcttcaaatatcaacatgatttgtaaagtgattaaattgtttaaaaatatgctgaattaaatatttatggtcgcagaaaagcagaaagcaccaagaagcctcaatttattttctaaatttcatttctaaaaagttcaacaatatttgtacaattttagcgatttgaagtttactaaaatagattgtcactaaggactgtaaatatcatgatgtgaccatttttgcagactgtccttagagttaacaaggaagaaatttaaacagcaagcaccattaactacaagataaaaggcttttaaaaaatccaaattacaattcccatagggagagggttaatgtacctcttcatcaattgttaaaggtatattattattaaatggattaaaaacttgccaaatcttacttggccaggcaccaggaggttggaataattaaaagataataatccttaataacctggagccatgaaatgtaacctagctcatacctacccctcactcttttcattgtaaccatttccatacactgtgagttcacagcctcttttctcccccaacgcactctgttttcacatctcagtacttctctattttgccttcttccctgtagtttgcctgggaattatgtgagagcactggatgctcttctacctccagcaggaaattgctgctgggggaacttcctaccagggataagttttccctgtgtggaagggggttgggaggggtgtgtgtcttgcaggccgcctagaatagattccagaccttgggccacacagcctggtaagtcaaccaacagcctcctcacacctcatatttgcattccagttcactgagtgatttcacacactggctggcaattcttgagcctgctggaaaaccaaccagggattcacctcatccatcactggtctgcaactgccttttgagggccacagcaggggatggagaaatgtttcttaaccagggctacatcagccagtgaagggggatacgctctcaaatgcaaaccctggaaaaccagatggataagaagcagacctggagttcaagatgggctccaaaggtaagagaggtaggttcagatcctgcttcagagctaactagttgtatgaccctgggcaagttacctaatctccttaaacctgtttcttcctctgtaaaatcgggataataaaacctacattacagggtttgggagctttaaaagaagtaactgcaggtaacgtacacagcccagtgtgtggtaaacaaaaatgtacttggtaaatgttaaaccattgtgcttggaagtggtgtgggttaatggtcaagagccttgggtccggagccagactgtttgggttcaaatcccacccttagcatttaatagctgagagcattgggtaaccttcgctgactcaatttatctgtcattaaaatggaattttattacaacatagcagatatttaataaatattagctacttttatttcattggcagtaaaaacagttgattgagtttccacctcaatcaacaacgtagtagtgaattaaatgagaattcagtacaatgcgtattttttaaaaattgtgaagaccttgtatgcatttatgacttttttgggcagagtcaagctgcgatgctaagggtgtggttaaactgtaatatgaaggaaaaaattcaaacagggagcataaaccacccaccagggagctatttcttttgtaatgtgcattccatttcttctccctcatgctttttaattccttccatatttcctgccataattatcaaatgtttagtttctgacctcactttcctggagactggagcccggggaatttagaattgtttattttctgtccataaacctttgagttaatggagcggcttctgagcaaagagtttgttggtttgtttgtagtgtctcaggaaggtcgttagagttgaaaaaattggtacaaaaaaacaagcgctgaaatgctttaactggaaactcgagcccccaaagagcagagcaatggatcttctcttacacttgcgcaacgttacagggaacacttgggaaaaggccgttacattgcccagatgataacacaaaacccgaggacacttcacaaagaagaaaatacatttcagagaatcatgatctcactttaaaagagagaaaggaaaattaattttgccccaaaagaagaatcccgattcctctgcccccgcccccaggagacagacttgggagggaaaagtccccaactactctcagtctcctctgaagtgaaggacggaactgaggcgcctttttgaactcgctgctgctccagtcgccgcctcgtccccgtcggcccagcccgtcccctctcctcctccccgctctccctccatgttagccgcggcggggctcccgcttacggcccgaactacttttcctgctttaaagatttaagtttcgtaagcagcattactgccccagctccaccccagcacaccccaaggaccgaaactcccagcgccaccccgggagagcatccccaggacgcgcgcccacccgcccagcgcgcagacccaagaggccccggggaccgagttcggactcctcggcccctcgcctacctcggcgcggacccaggcgaccgccaccagcgcgagcgcgagcgcgagccagcgtttccacatctgcggaagagagaagagagcgagtctgaaggcgccgggccccgcgctgacctgggaaacttgctcgggtcccgcaggctcgctccggccgcccaagcacccccggccgcccgaagagtccggcctccgcgccgtgcgccctgcgctcaccgtggtctggtccaggtctcctgggggcgcggggcaggacggcggcagcgagctgtaagcggaggtgggagctccgccgatcgccagcctcggaggaaatgcgacctcccctcgccgccccttaagacctctccttccccgcctgcctgcccccccagctcctccccattctcctcccccttctgctgcagcggcccccgcggctcccgctccccctccttccgacccctgctccggggagcccgcgggagtcctggcgccgccgaacccctctctccgcacggtccctcgtccggcgccccttcggccccctggacgtggagcggaggcagagggggtgtcccgtgggtccctgccacaaaggggtagggggaagggaaaccccaccccgggaggggctgctggctggcggcggcccgggcgggctgcggcggtggccaggtgggcggtgccgtggggggcccgggaaggtccgggactggaacctggaggaaaagacgtcccgcggcctaggaagcggagccgccccccatggctgaagggggaggcccagggaggcagaggagaccccgcatcccggggtcacggcagcagggcagcggggcaccgggaagtgggcgcagggccgggaagaccggccggcgtggggaaggctgctgtgggttctacagtgcattgtcccgggtgaggtggcggccgccctgctctgctgggaagatcctgagtccagcgtttgccggcagcctcatcccctccttccctcgggccggggagcggtgtccccctcctctcttccgcccactcactcatcacctgtgtccctcctcccatccctgtcatcccaagtagcctctgtgttcaggattgccatcttcaccaccttcttcccagcccttggccttcgaaagtgtgctacctctttgacagggttaactccctaaaatgctcctaattaaggcgcctttcctgccataactagtaaggagagcagatccacttagcaactcagatttcacatgcccaagactaagcctcacttcccccagcttcagggcctgcttatctacctctttcagggtggttgccttcaaacctatctccttttctcagagccggcttgtacccatagcctggcagtttagccgctgagatctcatatgcatcccctcgcctccgttcacatgtccactttcctaggccagaccttcatcctccctcactcagaaattctggaaacctcctttcgttgtcctctgactccaggctctcccctgtagtctccactgcaatccattgtcatattctttcccttattttaaacattgtcttcctcgtgttcatgttcttcctctactcagaaacttcagcgttcttctacccacatcaaatccaaactctgcctttcttataagccctgcattactgggcccaccctgtccatctaacttctcttcaactacatcagcatacttcctccgctcaaagcaggcccatctcctcgttgtcctctgaacttgtcatactcactctgctgccaaggtttgttgagtgcccactgttgtggctttagggggcttcaagataatacccatggtccccatgtaagttcagaatccactgagatagcaacaggagtcagacttatggagagcaaaatgtcagctttgtctctgctaaaggctggaatggcagccatggctttagatctgcagggacagcgggcccagaattgaacatgtccactcagtcacaagcagagctggaaaacctgcctgtgtaaaaactaaactgcatggaaaagcagaaaatatgtgcctcctgggacatgcctgctccccaaacttgagggggtagagtgacacatccccagttctttcaaactctccagtcagacaacttactcctgctcccttgttatggtaataagattagggaatagatgttccgcaccagatactctgtcttggtcactgtgcaaggattgaagggaactattgtggataaagttctgccctcgaataacgcacaatacattgcatcccttgcagatccactgcaccctctcagaatctggtatcatctttcctcccttcctcttatctactaaaatgcttgggtttgtttgtttgttttgttttcaggaaccacgtcaagtttgcttccttcatatcttttctgacaacagcttggcatggtagaaggcacaggaggtttgaggtcaaaccaatctggctttccatcctatcactgccatttactagctgcatggcctgacttgcatcaaataataagccctctgaacctaggtttctgcctctgacaaatggcagtgataatgccttgcagggagttgtgaaatttaagcagatgcatataaaaagtgcctggcaggtagtagacctctgtatgtgatagccattattatttcatgatcggctttgcatctaaattgtagttggtactatacaccaggtactatgaaagccattcaacatctcttattttatttaattttcacaatagatagaaaggaggctgggcacggtggcccatgccttgtaatcccagcactttgggaggccaaggcaggcggatcacttgaggccgggagttcgagaccagcttagccaacatgattaaaccccgtctccactaaaaatacaaaaattagatgggtatggtggtgggcacctgtggtgccagctacttgggaggctgaggcaccagaattgcttgaacccgggaggcagaagttgcagtgagccgagattgtgccactgcactcctgcctgggcaatagagagagactccatctcaaaaaaataataacaataaaaaataaaaatttaaaaaatacagtaaatggaaaggtcttttttattgcttccgttttccaaataaaactgaagctcaggaagatttagatactttcccaagtttatactgttggctacacagccttacaacttggggcattatattgcagactgctatacaatgtttaacacttgttctcatagttattcttgattctccagctagttttaagttgcttagagcaaaaacaatgtttttcatatctttatcctctctacatttggaacacaattaatggatttgagtatatcaaaatgaaatgaaagattcctgttcaactgagggcaccatagacaaaatgatagaaggagatataaatgtctaaaactgacatgtaactcataacacacacacatacacacaccctgcaaatcaatcagaaaaagaaaacccaataaaaaagggcaataggtatgaataggcaattcccaaaaggggaaccccaaatggacaataaatatagaaaagatactcaacatcactactattatttaaattgcacaacaaccatttgaaatcagtattattttattatctccaatatacagatgaagaaacacacacagagtttaagtagtttgtccaaagttatacagtaaattataaatgtcactttacactcatcacagtggcaaaaatcagacagttggacaatatcagtgttagcatgtgactagtgcaatctttgtggtgtactgtagcaattaaaagcatgggtttatgagacagactgccttggtacaaaattgccttggtagtaaatcttagctttactacttattatgtaaccttgggcaagttacttaaccccttgcatctcagttgcctcatctgtaaaatcgtgataattgtactgatttcatagagctattgtgtagattaaatgtatcaatatgtaaagtacttagaatagtgtctggtacacagtaagcatataaataagatgtattactacggaaataattcactagagagctcttacaggtactgatgataaaactgtgctgtggcgtatggttaactctacaataaataaagcaaaagacaaaaataaactatgcagtggagaaaatattttgaaatgagatatttggaaatgtcttatcattaggctattttgttatccaaaacaataaaagtgtggcaccataaaaactctcgtgtatgcacattttaaaaacttacacaaaattttctaacctgtttaaaaatcttcagacagaattccagtggcttatttactcatttgttgaaaatataaaaatataataacttgggaccagcatggtggctcacacctgtaatcccagcacttttggaggctgaggtgggatgatcacttgagcccaggggttcgagactagcctgggcaaatgtggcaaaaccccgtctctataaaaaatataaaaatcagctgggtgttgtggcatacccctgtattcccagttacggggggagtagggggccaaggtgggaagatcacttgatcctgggaggtggaggctgcagtgacccatgattgcaccactttactccaacctccgtgacagagagagaccctgcctcaaaacagacaaacaaacaaaaactaaccaaccagccaaacaaacaaaaaacctttcaattaattttgatttccagagcagatgggaatttatgagccaaatttcaacaaaaaaaccttcgcatgaatggtttataggactggaaaatgagtaatttggtgggtgagccaatggtacacatcttccatccagatctgtagagtgtcttaatgtcacgatattcagtacacattgattcctttcgcatccagcttgctttcgccatgcttcaggtaacaatacccaccttcgctctacagtaccattcttcttccactcctcaaacatgcaaatggcctaggataagtcagtcaccacatttcaaccccttgaccatagtgattactttaagagtaggaatttgaccaaagtcaggccaatacagccatatttgtgggtgctttcatcttccagggctgccataaaagtatatcacagactgggtggcttaaacaacaggaacttattttctcacagttctggaggccagaataacaagaccaaggtgccggcagcattgatttcttttgagatctctctccttggcaggcagatgactgc

SEQ ID NO: 402 - DNA, 8060 bp, Homo sapiens
tataaggcaaatggagataaattatacatcaagaatagcactgccattgtctgaaggatactattttcagattgtgtctgtatgtgtgtgcgtgtccttagagccgttagttcatgaaacagcaggaagttcagttttaaaaactaaggctagttccagctaacatattgtttactatccctatttccaaccaggaattactcaaccccaataaaagccttttgcctggaacatttgggaacaaaattggaatgagcaaagggttaaacagactcccacattaaagcacaaacatctcaaacctaagaatgggtcaatccctatccaaatgtttattttgggtccatctataaaacctatttagagtcaacttcaattagagaagatgactactagaaggataatgcagaaacagagtttccagctttttttttttttatcagtttgctcaacattttaaaatgaattaaaagcagatgttgaaattgctgccaactgttcacttgtcatctgtgaatgggaattaactgggttttgttcatcattcaatcaaatgttaagcttcagtagtttaaagagcctgggaatgcaggtcctgatgggattttaaaacgacaaacaactgaagtaattttgataagtgtgaaaccatttgtccttgtaagataaaaagggaaattcttgggaaagtttagaattctgaaactctcacacaatagctgcagaaacaaaaatcaatattttgttatttaacaagaactcttaagcactatctatatgttctgccctgcatttggtgcactggaggctacaggggaacttaaaaatagttgtcattctcagagttaaagaatataagatgctgtagtgcccagatgagagtgcctgttgatggtcctaaactaggtcagaggcgacagaatgtaagaagggctgagatgatatgagcaggaatctcaggggaaagtttcactgaacaatgaagaatgtgtaggatttaatattacttcatgtggcagccagcctctgagatggcccccagtgattcttgtctttgggtattcaagtctttgttgtggttccttcccacattgaataaggcttaccaataagatattgcagaatttacgacttctgagggtaggtaataaaaaaaatgttgtagcttcaatcttggtctctgttgaactcttactctgcgggaagccagccactatgtcaagaggatgttcaagcagcccatggagaggctcatttggggagtatctgaggcctcctgctaacagtcaacaccaactcatcaggcatgtgagtgagccaccacggaactggatcctccagccccactgaagcctttagatgactgcatgactgcaaccctggccaacatcttgcctctgacctcaagagaccctaagccagaacatctagctaagctgcttctagattcctgatgcacagaaattatgagttaagtgtttattgctttaagacattgagttttggggtaatttgttgtgcagcagtagattaaaacatcttactaggtctttgtctttatctaagaatgcacgaaagtcaagaaaaggctgcacgaatatggaataaatgatcaagagctatgttatttctccatctctttttaacaaatgctaaaataatattacaatgaaaactgaattaaattctactcacataacaactatgactatgcagatgagttcataatccttacctgtccctgaacccaaccagccatttctatataggtgaatagcttaatccattacaaaagtactacaaaaaattccctagttcattttacaaatatttatggagattctactatgtgtcataggcatggtacaaattaagtacatgtaatacagtataaattacataattatatggctcagaacaccaaataataaatgaaaaatctttttatgttctctataatttaatttaaaactaagacattttaattttcttgttataagaaatacgctttgattttatccaaggataatatgaaataatacaccttcccatttggatgtgggaactacaattagatgcacaaatgcaagcaggggacgcactccaagatttcataatgaaatcttctctagttcttgaaaagcatttttgttttgttttaagcagaggtccattattagaatttaacaaattctacttgagggagtgaggccctgtctcagaaaaataaaaataaaataataataaagaaaaatggtttggccaacatggcaaaaccccgtctctactaaaaatacaaaaatcagccggccgtggtggcacacgcctgtggtcctggctacttgggaggctgagacgggagaatcacttgaacttaggaagcagaggttgcagtgaactgagatcatgccactgtactccagcctgggtgagagtgagattctgtctcaaaaaaaaaaaaaaaaaaaaaaaatccgctagaagacactatcgctaaacaattttggttgaaatcttgtccccaatgggttatacatcactaagatattgaccctatctagaactggctccctaatttgtgaggcctagtgcaaaattaaaaccagtggctccttgttcccaaattattaagaatttcaagatggcaacaccagagcatgaaatcaagcacagagttcttctaagcatgtggtctcatgctattgcatagactacatgcccatgaagctggctctggctccattaaagaacatagaagtcagaactttccactttattttgacagaataaagaactgtttaaaaatgtcaagtgacatatttttaatgggaaaatattttaccagagactataaagcagttgctgatttaattatactcaaaatgaatcataattgaggactagaatcttcttaaccagtgagcaactgcttctcatgtcaatgactgaataggttttaaaaccattttctgaaaagtttctgaaaatctactggcaacaattgaagggacccaggggaggtcctgaatattagaatggtaatgtgacctagattcacgtcttttattctttttgatagagggcatctacagtctcattctatgttaaaagaaatgttccctaacagagaactgaacattacagagatccgggccttggaagtgggtgcagtaccatgcagatctgtattatttccctttagggaagagagtgaacatgtttttggttgtaaatgagatagctgtactgttttgtatctatttaaaacaaatagtttttgaaactatgaaacattttagatacctaagtatagactctataaagaacactggccacctatgtggccaccttggggcccttaataaatatttaaaaattcatggaaactcctccctttccctgaatgtaactgccattccgagttttctatatatcattctcctgcattttaaactcatatggatctattttaaatatattgtcttttaaacaccaactataaatgataccatactttacctatccgtctgcaatctgttttgctcatttaacagcgtatttttcagatgtatccatattgttacatgcagttctacttcatcactgttgttttcagggcttgcaaaagcgtttctttaggtccatcctcctgagcgtgtgctcaccccaaggccccggcggtggccaagtgtccgcccatgcggtgtaaaggggaagtggaacgcgtagagaaggattttggcagctctgcttgcctggaattccagtcctagaattctaaattcggacttgatcttccagactgttaggaagatatatttaaggtaggaggctagaacgtatctcctttagtatatagcttcatttacaacttttaaatattcagtcaaaaagtatgtgggccttcatttacacttttgacggggcctcacaaataggggtggtctgcccctttccttacgtcccactctttcttcaaattaaattgctacagcaggaaattactgaactgtggctcttctcctacgtccgccttccctatgtcaattcccatttcccttgctttctccaatagttaggactgtaaattctaactttgttaatttcgacgccaagctggaatgaagacgctaagtggacgctaaaaagacacgctgtttgtcacacaaggcctccaactgggacggcgtccaccgcgccccgccccgcccgcggcaccgtggcatcttgggacatgtagtctttggaggggcagctgcctccaccaagtctcctcccccaagacgctgcctttcggcctcgggacgccgtgacgttgcgttcctccagtcccttgccacctccctctttcttcccctctggggaagctcagtgctggacttccgaagaccttttacgacattgagtctcggagttggtctcagcgccggatccacttttcggcaaagtgacgtggacgtcaacagcaatggcggaaggagaagatgtgccgccgctgccaacgtcgagcggcgacggctggtgagtgaaagccggggctaatttccaatgcccctttattcttccttctcaccatcttgccggtccccgaggagccgtctggcgtcggcatggaacggagaggccggtcctaggcgaagtccggtgccctgccctacccctctgccagctgggtgccccctgcctgcctggttctgcccaagggactggggcgggactcccaaggagaggggtgtcatccaggtgctgggcctcagaacggtcctcctgtgtcgtctgtcagtctccaaagtgtgctggagtgggtggcttcagggctgggtttggccggagtcctggctgtgggagttggagtaggctgaagaaggaagtttgttggatgcagatctgagtcactaaaatacaatgtgaagaaaagacgttttgaaatgaccactgcgaccttcgcctgagggttcagaggttgacccgaggagaatccctcccacttagttggtatacttttttttattctggctgttatctcgttttgcattccaacagttttcatcgttcgtctccttcacgcaagtcatcttttcccctactaccacatttctcacagctcgatttctgagctttggatgcagtgtgggactttgctcttactgcacccaagctgttgcatgcttacctgatttatactcgggattgtgggggaagaccgccaataattttttggtaaactgctcacccagtgttaatctttgggaaaggcttctacttttgaaatagttgatctcacgatacactgttaggttgtacaacatcattttttaaaaagggacctttagaggcttgtctaaattttacagttgatctaagtgtattgaccacatgtattagttttggatttgcttgttcgttatattgtatgtgtacagctcatgggcactttaaaaataatacaggacattgatagacatcgactttaatcccagaggaaaaaaatggaaatcgttgaaagggatagataattagtaattaagaaattcagctctccattagcagacatcaaacattaccgtagcgctgggctctccaaggtgtcagaggaaaacttcatggtgatctagatatagtttttttttcttcaacttgcttatgttggagttgggaaggtgtaacaaggtaaaattaatcttattctttgtgagtgtgattcaaagtgttacgagaggttggcggtgggggctggggcagttggagtcactgggggaaagcttcatgaaagcagcagtgtttcaactaggctttgaagaataagtaggatttaagccccagggctgtctaatagaagccacatattgtaatttaaaattatgtagtagcagcatttaaaactgaaaagaaggctgggcgcggtggctcacgcctgtaatcccagcactttgggaggccgaggcgggcggatcacttgaagtcaggagttccagaccagcctgaccaacatggtgaaaccccgtctctactaagaatataaaaattagccgggcgtggtggcgcgtgcctgtaatctcagctgcttgggaggctgaggcaggagaatcgcttgaacccgggaggcagaggttgcagtgagccgagatcgagccactactgtccagcccggcggcagtgtgaggctcggtctcaaaaaaaaaaaaaaaaaaaaaacactaaaaagaaacaggtgaaatcagttttaataatctatttaacatatttcaacatgtaatcattgtttaaaaaattagataattgtacatcttttttgtgccaagtcttcaaaatccaatgtgcattttacagctaccttatatttcaatttggtctagccacatttcagatattaaatatccacacatggcttggagctaacatattagtgcagaatcagattaagagatgggaaaggcctctgaatggagtaactttcatgcgcgtccgtgtgaagagaccaccaaacagactttgtgtgagcaataaagcttttaatcacctgggtgcaggcgggctgagtccgaaaagagagtcagcgaagggagataagggcggggccgttttataggatttgggtagataaaggaaaattacagtcgaaggggagttgttctctggcgggcagagtgggtgtcccaaggtgctcagtgggggagctttttgagccaggatgagccaggaaaaggactttcacaaggtaatgtcatcagttaaggcaaggaccggccatttacacttcttttctggtagaatgtcatcagttaaggcggggcagggcatattcacttcttttgtgattcttcagttacttcaggccatctgggcgtatacgtgcaagtcacaggggatgcgatggcttggcttgggctcagaggcctgacagtaacagcataagcaagggcatagacaagacaactaatttgttttgagagtaagaatgagaactacctggttggagagaagttgcagaaaaatacgtctttttgcttctggtatcctgcaagaatggcaagagaaaaaagaaaaatagatctggaaaaatagtaaaaaagtttttaactaattaaatgcaccttttaagaatcagtgacagacattacaacacttttcagaaagtgacctagctggttatagcctgaagtttgctgttttggaacggtgaattgtgtcataaactggcggtaaccagctcatagagtgccatgaggggaaatgtttccacagttaaggtgcctctggggagttcttaggttagagggattgtgagaatctctggttcacatgggcagaggacatggagtgaatgtttactagagacagcattttttctcttgtaggattgatgtatctttggtgtgtctttgtatttttgctggtttcattttcatgaatggaggaaccctaacatggtcggtgatttctgttttccctccatcctcttctaatctttctcctttttatcctggcactctcatcagccccccagaagaggatttgaataggaagactttgggattgggagccagaggttcagtaaaggctctgttcttagagtgcttggtgaatgggttatagaatggggatgctttactcttgttttgttttgttttgttgaagaaacgaggtctcgccatgttgcccaggctggcctcatactcctgagtagctggggactacaggtgtgccccatccatccgggtgttctactctgtctttctctcccctccccctccctccctctctttctttatctctctttctttttggagtaaatgtttttattttaactctgtcagatggaattttttctaaaatgtatcatatatcttactgcctagctcaaactcatcttaatgacttgagtcattcagtttacaaatgtaagtgtaatttaaggatagaactaggtctctgtcctcagggaatttatgttctagatacaggaggcatgtttgagaacatcgattacttttgtgttattgtaatgtggtgagacttttagggcctatctagacaaattgttgctatgttaagtgaca

SEQ ID NO: 403 - DNA, 8060 bp, Homo sapiens
ggactcactgcaggggtgagggcctgagcagtcttatccaggccacgggggcagggaggcccacgccctgcatgctgccaccatcggctgtgcacagctggggcagggagcacgggagagaccagaggccacagtgtgaagaccaggaaggggaaaagggtagagctgcagccaagcagccaagaaaggggctgcggcgctttaggggctccagcgagcaacaggtgggaaaggctgggccactcgtgcctcagagaggaccccgggggtcccgagcatgagtctttgagaatcggagcactgtaacagcttgcggggacggccgcaggcccaggaggaggaagagcgtgaagaggaggagatggtggctgtggtggggagggcggtagaggctccggccggggctcacctgcaggttggtgagctgctgctgctggtgcgcgatggtctgcttcaccagcacactcttgatgctctgctccatggcgtacttcttggcctgagagaggcggcagtgaggagcactgggggcccagcccatgggagacaggcctgccccgcaccccgcccctgcccctgcccccagttgactgtcccacacctgcagtgccctgggaggtccatgctcaccttctgaagggcctcctgctgctcgggcgtcaggggaggcagccccagcttggcggctgtgctctgcccgttctccatcttgatggagtctgtgccctggtaagggagcaggggaatccatcagcagcaagctcaagttctccttcacgtggccccaggagggccacccctagcacagactgtcccctgcctggcctgtactcaggccagcccttctgacattgctgtccccagcccaggccactgtctcccccgggacccatggggtagaacacagactgaggcaggcaggtgccctggaggccctgggccaacccgagcagttgtggggcccaggccacagtggcctcctcgggaaccaccaagataaacagctggaggcagaaaaggggtccagccccttgttgtcagtctgaccccagagctgctatcacatgcccggcaggagagccagcctcagccgtcctccaaggcaggagaaaagggccacggctctctggacgttctgggactccttgctcccaggctcctccaggcttcctcacagtccctgccacagacacaggctcagcttccctggagtttcaaggggcccacccaaggagctaatacaagggcctctctcccaacagtgctccccccaccgtccccgcaggcactgtgcacacctcccagagaacacaggcctctctcgggccacacaagccctgaagagggctccagctcacttccacacactcttgcatgggctttgcctggcccactgggagaagccaggagcagaccccactggcaccctagccaggtgggcctggggaccaagaggcccttgggcagtcacagccactgcagacccaagctgatgccaaccaggattatgtttacgtccctcctgtcaaaatccatctctaagctttttgcagagggaagaacgcagctgtgtgagcagggaggcatggctagcaggcccatcagagtgtgggatgggcaaacagcatgcctgcgcctgtcctccagctcagcaagcacaaagatcactggcccaccaaccgggccctccgagacttccagacacagccttgagggacagcagagaagagagaagggtccccagcacagaagtgatgagcaaggacagagggacacaggaggcaggaagggacaggctggcccaagccccaagaaccccctcctgcctgccaagtgctgggatgctggcccaggctcaaagggcaggaagccctggagacccctccccaggcaaccagagccccaaccagtccctgaaggtcaaaggctggctgtgggtggcaccaggtgccccagtccggctcacaccaggcctgtcctaatcaccctcagcaccaggtgccccagtccggctcacactaggcctgtcttcaccaccctcagcaccaggtgccccagtccggctcacactaggcctgtcctcaccaccctcagcaccaggtgccccagtccggctcacactaggcctgtcctcaccaccctcacagctggccccaagcccattcctccttagtgggaaagagggcccaagagccagaggctgggacttgagagcaggctgtcaccatggtaatcaatgccaaccccctcagcccccagacatttttcaatctcctctttgtcttggtaaacaaaaggcccttctcccaccaaccaatggccggctgggcgccagccaagggccagggagcaccagcccccacatctcccaggatccaagctgcataccatgtcccagtcccaccccctgagtgtgcctgggggaccaagaggagggcccagccccaagaggctgccaggccaccttgctgaggccccactggaatgctctggaggcgggcgctaccatggagaagcacaaagaacccaactacccagccacaggcccagctccacctctgagaggacctgctcccaaggctgggccatcgaacagaccaagacccacctgcacccactctggagcctggggccgaaaaaagatggggagggctgagtcccaaccagacctgtgctttgacttgcgcattgcttcactgttttatttaaatgaaaacacagaggtctgaaatgaaatctgtccttctggctcctcaagcactgcgagttctgggaagcttggcccacccttcctgcaagacgctcatgcctaagaacgcgcgagctccaggccccggcgtccccgcccagccagactgtcaacaggccccgcctggtgcttggagcagggcagatgcagagggcaaaggccagctcagtgcctgggtggggagggtgcagggctggtgcggggagagggccgtggtcctgcgggcagttgtctgcccagaggcagagaagggttcccgaggttcctcccgccccgcccccagccagccctctctgggcccagggacgcacaggcaggcgggcgggcgggcgggcaggcgggcgggcctgagggagaggatgcttaaggtcagtacctgtggaggtttccatttgtctcccgctgccaccactgccgccgccgccgccggctcggacccccctccttgctggccattgacctgctgcaggcaggaaggagatgttgtaacgacaggcacaccaccccaccgcccaggcctgctctcctcccgagctaagggctgagctcctcacggataagcaagggaggccaggcagggaggcattcccgacatgaccccccagcccaaactgccctctcttcacacccatcagcacgcccagggacccagtcagaagcagagcggagcatgggctgggccagggctgccagcgagtcccagcggggatggggaggagggtagagagagctgtgctcctgccccaggcaaaagaaagccatcctctcctgccggcaggctggacggccaaaggaaccggctgggtgtcccccatgccctcctgaggcagcagcggtgccttcctggcaacctgtacacaccttggccagcccacaactcagccccagctccagtgccttccacaggctctggcccagcccaggtcccagttctctcctgaagacacttttaagcagcatggtgggcaggggtctggatgcgcaggcctcccttccctggcaacagaaccatccagagctgtctcgcaggaggacggccaagaggttagccctctgcactcagtaagacccacacctaagggggcacaggaaggaggagcagctccacaatggtcttgagggatggcagggcaaagacaggccacgggcaggaaacgggtaacgctgtgggggtcgggagatgatggaagggccttgagacctactctaccttctcagaggctgcacaacgagaagcaaggcagcatgcagtcaccccactcccagctcaaggatgagacccacaatatctaagaacagaagagatcagcgtgcccacccttggagccatgtgcgcaaagccagaggctgggctgacccaccagagtgtcccaggtccttcagcctccagaggaggagcagcaccaccagcccagctgcactggggaaggccaacccagcccgtgcctggagctgctcccaatgctgtcggcatgggtgtgctctagctgcccaactcagccccacgctgcctaaacactgcaccccggagagagtgaaaggaaacaaggggcccctcccactgcatgcacagccagagcagaggctgcctcttttttttttttgagacagggtctggctctgttgcccaggctagagtgcggtggtgcaactacggcttactgcaacctccgcctcctgggactccaggcatgcgccgccacacctggctaatttttgtatttttggtagagatgggggtctccgtgttgcccaagctggtctcaaacaatccacctatctcagcctccaaagtgctggtactacaggcgtggaccactgtgcccagccaaggctgcctctcattgcccacagcaagagatcacttcacgaccagtctccagatacccgtgaacagggtgaactgaggggcacttttgtaacttcctgctcccccaaatcactgcactaaccaacaagtaagccacaacagtgttgacagtgggatgtggctcggaaaaacattttcttgggaaaagccggcccactggtgcattctacacaggacaccccatgccattcctggcagatggaagttcccagctgcatggagcttagggttctgtgctaaccagacgctgggagaacttggaggaaaccggtgtttacaatcgcagctagtcacgtactgccatctttaggcaattaaaatggcgtctttatggtcaggatgcccccagcaccaggcagcagtgcttggagggatgggaagcccctctgaggggcggcacagcagaggggctctggggtgccaactctgggactgcctttcctcagcccagagcaaagaagagtatttccatcagaaaacaagaaaagcaatgtaggggctgggcgtggtggctcacacctgtaactccagcactttgggagaccgatgtagcacttaagaccagcctggacaacacagcaagacgctgtctctatgaaaaaaaagatttttttaaaaagtaatgtggccagacgcagtggctcacgcctgtaatcccagcactttgggaggccgaggcaggtggattgcttgaggtcaggagttggagaccagcctggccaacatggtgaaaccccatctctactaaaaatacaaaaattagccgggcatggtggcaagcacctgtaatcccagctacttgggaggctgaggtgctaccatgaattgcctgaacccaggaggcagaggttgcagtgagccgggatcaccccactgcactctagcctgggcgataaagcaaaactccgtctcacacacaaaaagaaaaaaaaaataatgtggagcgaatgactgaaggtcccaaggtctcaaggcttcaggctcctcagctgggaatggggacggcctgtctcctagggctactgtgaagattcagtgaaatcccaacacgcccccaaccccacaacctgcagtccctgcacatggaaagcagcaaagcaagccacaggttccagcactcatcagtattaacaacatccagtgtcagatacccagggcagagctggctgcaggacactgccttctatctgtcagttcccttcacacaatgaacactgcttactgcgtgcccaggctccacagtgagcgctgcagaggccgcagacacgagacaagagagaaagacgtctctctcaggagcctggtgtcagctgccagcaaagaatgccaaaatcaaagatgacttctgtggtttaccagcactacgaagaaagcacaggataagaaaggagtggctatgagctatgccaggccatggcagccgggggcctctctatgaggtgacattgcaggctggggcctacagaagaaaggaactggaaccccaagggtgatgaccccaaatgagagctggtctggctgtcagtgaagagaacggagccatgcgtcaaagtgaaaagatgcatccagaagacctacccttgctgcaaagaggcagccggcctcattctgcagccaccaggcagaaggcatgcccatgggaggggaggcccttctgcatcttctggcttccttccccaccaggccactgtcagccaagttcagctgctccattcaacctcccatgagagctgaagcagcatgagacaggggacaggctctcatcactgtgcccaaccaggacggtgggaacagataacccttctagaagcctttccatcccaatgattaaaagaggaatgggttagaccacaggctacagctcactcctggagccggatgcaagcctgaaacctgacgataaaaaaacacgtattaaacccaacagaatttggatggcaacaaacaccccaacagacaacccgttcgtggggtcagttatggcccacgtccaactcaacaatgacaccacctatctggcaccacgccacagcagacctgagcccccatttaaccctcatgagcacagggcgctgttctgcgggtgctaggggagtcaggcatccactctcctcctccaccttcccatgtccagtccttgtctctgagcctcctcctccttcaccatcaactctctgactgctgcctgaagacagtcaccaggtcctcaacccttacatcctttctctctggagtgcccctcaaaggtcacttactcctgtggcttcaagagaaaggacatagtagaaagagtggagttagccagtcctgtgaatcacacactgggctgccctcgcaagctgggtatcttgtgtaaatgcctctctccccctagtaactggtttctgcctcagtgggacatgggaccagcccgcccgctgggggcctggcaatggcagtctaaggacactccctggtcctgccagtccagccttcagccatttgcccaagctgtcttctcaaacagaccttatcccatcccgctgggtgtgggctgggggaagggtgacaagtaatacaggggtaaactgcggctgagaaaggtccaaaaggggattaggtcctataagctaagtggtgagaaggaaagaccagacttcatcgtgcatgtgttgtgtgcatgggtgttctccctctacgttaataacgcctgccctgcccggggaagtgggcactgagcagagcagggggcgactcactcctctggatgcccacgcagctccctagggcgcccagcaaatggcaccctgggtgggaactggcttctggtgcgcactagacctccaactgcctgtctggttccccactgcgtccccagatcctcccgcagagctggggacaatgcgatttctcaaaacacgtaggatgagagcgcacgtccttcctttccacgtggagacaagagaatggagataaccagatccctctccagcaccggagaacgaattcacagctgcaggcgtagtgagccaaggccgccccatgctctgagctgcaggcccctttctacaggtcccgtccccttctgatcccatcaacccgaaggcccacgcgtcacccccagaaccccgcttccgtcgtgaccacggcgcacacccccgtcggcaaagggaggacgacgacccccgcttgccggacctagcggacaggaacgcaaccccgccaggctcgcccgcaagggccacacgccgcgcccaggcccccgccccgccccgccggaagctggggtccgcaggccggaagctgaggccgcgagccggccgccggcgcgcgcccgccccgcccccgcctcacgcgacccggggacacgagggagtccgcgcgggacctgggaagaccgccgcattcttgggaggccctccgcgcccaggctgggtcgacgacccggccccgcaagccgag

SEQ ID NO: 404 - DNA, 8060 bp, Homo sapiens
aaatgtattattttaatttggatgttggtcaccttgttaaagaaccctaaaattcaacattgagtaacaaagcatcataaatagtagatttatatccattcccattcacaaaaacatggacaaatgaaaattgaaatgaacaactgaaacccctgcttacaaaattggagggtaacaaggactaaagggatgtgtttcacaactgaatgaatgtgtgttaaaacttgctatacatggaattaaatggagaccaccaatggatctattactgagttattgtagaagatatagagaagatagtgggaatgatacaggtattcacagaaacttttctgtttctaacactttttctttttatttgcctgcttctatgttggcgggacattcattgcattcatgagttccagaacattatttgctgactacaacaccatgacaatacatctaaatattactactgcccatattcctaaaagaatgataatatggatcattctctcttttcaccttttaaaagtgggattaatggtttctgtctttcctacctggtggatgaagcaggcctatatgcttgcagttatccaactctactccaatataacagaattgataaagggtttatattgctggcaactttatgtcagttctctagctgaacctaacagtcctactccagggaagataatctaagtaaaataaattaaaagtggaggaaaggagaagtaattgtagctataaaaggagcctatgagaagctctttggcatactctaagatacatttggacgttactactacagtatgacagtaacctaggaagatcaacatttggggttcaaaatatacactcaaactctatttaagcaataagcagttaacaacaatgtatttggtgtagaattcaacattgattgaattgttctaaaagacagtttctcaaaagtggcctggaaagtatgattgaagttttcagaactctcctttttggactgaaatttcttcctcctgtatcatgaccatgtcctgtatctctcttaaagacttacatgagtacacaatctggaatcacatgtgttctgtaaaatagccaaccctgggtaaatgttgcaatgcttaatttaaaaatctggcctatctcgaaatgtattaatttctttttaagagatggggtcttgctctgtcacccaggctggagtgcagtggcacaatcatagctcactgcagccttggattcctgggctcacgtgatcctcccatctcagcctcccaagtaaatgggaccatagccgtgcatcatcatacctgattaatttttaatttttaattttttgtagagacatggtctcactatgatgtccaggcttttcttgaaatttagaaaatcagtcaatatacatcctgaattatcttatggcaacaacccactgaagtaagaaataacgtcttttatgtgactcatgtgcccttttcatggttcacagtcctcaccagcactgtcttattcttaattggaggaggcatcattcatatcacaacttgtgttctggaagtgcattctcatagactacaatgtgaatggggatcgttggatttgtgtcatttaaatatgtacacacacagatgtcctggacataattacataatatataacatgatgtaattatgtccagaatttgctttaaagtaaaggaagaagataagtgggtatggataatgatgaaagaaggttgaccatgtgtaattatttaagctgtgcaattatacattgactttcattattctcattcttttgttaaatatttgaaaatgaaaattctcaaaaaaatgttttaaagaaaaaatattcttatatatatataaacacaaatgtgtgtatgtataaatggagatatatgtgtgtatgcgtatgtatttaaatagagctgcaaacatattgggggaaacatataatggtatttagggtagtaatacgacctttccaatggtaagttagccaggaactttaaaagtttataccacctggcctattaatttcatgccttagaatttatcctgtgaaaacatgtgttggacattaaaaaaaaatttggcccaagtgctcatagtagatctaataaatcaaaataaaaacatgatgaatacatgattcctacttactaagagaaacattagaatgatatatttgggaggtggccaatttttctttttttaattcttttttattttttttagaattttagaaaatattgaattttaaaattttagaaaatattaccttaatggggtgactttcagtgagacatctggctctagtaattattagctgagagtaaaagaggggataaatagcaacttttagtcctcactatggagtcttagcttcaattctgaaattcttggacactgtgaagccagtattatgttaggtgcttcctccaacttattgaaacattaaatgatattgggacctggatttttttattattttatttccttattacaagtaaggtaactatgtcttagaaagaaagaataatctatccaatatcacctaggtagtttacggaactgcagattttgtactattgctctctatttccaaagcttatagtgtgattgttttccactatgtttctacacagaaacactcatttcagacatcacaagggatgagattctaagagaattaattatgtttgtgaaacgtggatcagggcatgctggagtttgtagcaaactatagttatcagtgattctagatgagcagggctagtaaaggcaaaggataaaaatctgtctctctaaccatggtttctccaaaaaaggttcaggctgatttacctaagagtccatctttgtgactgttaaacaaagacctacatgtcctggtttcattagtgaattggttttttgttcagcaaatattttacagcagcttttacatccttatttctcaagctatagagtataggattcagcatgggtgtcactaccccataaaacagagaaatgagcttgtctaatgcttgcaatttttcttccccaatcaggtcttgagacttcggtttcgcatacataaagaagatggtaccgtaaaatatgatcaccacagtcaggtgagctgagcacgtggaaaatgccttgcgtcttcctgtggctgaattcatttgcaagatggtgtagaggatgaacatataggagaaaaaaatgaccatcagtggaagaaccaggaaggccatatttgatatcaccatggtgataatattgagggatatatcagcacaggccagcttgaggacagctaatatttcacatgcgaaatgattgataatattattcccacagaaaggcagtctcatggcaagtaatgtttgcacagctgaatttattccaccggacagccaggacacagaagccatcaatacatacgccaccttgctcaggatgatggggtatctcagtgggttgcagatggccacataacgatcaaatgccatcatgccaagaagcagacattctgttgaccccattgcaaacccaaagaacatctgcactgcacatccagagaaggaaatgtttcttttctttgagattaagctcaccaatgttgagggaacagaggaggatgtatagcagatatccaggaaagagaggttgcccaggaagaagtacattggtgtgtgaaaatgagaatcaaagatgctggctatgattagaacaccattgccaattagaatcactaggtacataactagaatgagagcaaagtaaacaatctcaatctttgggtatccagaaagacccagaagaagaaattctgacacaagtgtctggttaatctcacccatgtcatctgctttcaggaaatcaaaagaagatctaacatgaaatgtatttactgccaagaaacaaacagtacaaattaactgaacaatcattcttttgacacatattagaaggagtgcttgcttgaagttctgacatccagttatcttcagtaatgtgtgtgactagaatacaatgaaattgggaatgatggaagcacctataccgcatcgccaatatgtgaagatctacccacgatcagacacacatgcagacggaacctttcctgctgttgaggacatgttcctgagttgaggacactctcccgagctgaggtttctaaaacccctggccaatcaacaactctaagcttaacatcttcatttcatcaaccccagcaaacaagcagtaaagggggcaaaagactactcaacaaagactggaattttaattcagcaatttataaagtgtttaaaatttcacagcaactttgacatttttgtgtgtttatatttttttctaggcctgatactaataccttatagttagtttaattgtgtattttacagacacttaataataatacattgaatcacataccctgaaatttgacaattgtttaaaggcatagttagttgttgatctcatagtatcttgttatgactgttcctatgacaagaccattgcccagaacagctccgcatgaatgtgatagtctttggagaacattatatagtgtctttacatattttactctgtagcttaagagtctgtcttgataatttactcatttaaatcaaccaataaaaacagtaataatgtttaaatatttcatataaatatgtatacatgtgtatgtataccactttaccatttacaaattataatattctttatattaaccccatttttcaactataaaatatggaacttggccaagattaactaggtagtaaataataaaatgtaatgtaaagctaatattttcgacacaaagtctagttcttggcttcactaattttcatatacacgtaaagcatctaggaatttttttttcttttttgagacagagtctcactctgtcaccaggctggagtgcagtggcacgatcggggctgactgcaacctccacctacaggcgtgcaccaccatgcccagctaacttttgtatttttagtagagacggggtttcactatattggccaggatggtctccatctcttgacattgtgatctgcccacctcagcctcccaaaatgctgggattataggcatgagccaccacacccggcaaacatctgggaaacctaaaaaccttcagattctcttttagtgttcaggccagtcctgagattctgcatttcttgcaggtgcccaggtgacgcttatgccactggtcccaaaatcacttgagtagcaaggcttagtctatactaagttggccaattatctagatgtttctaattcaagccagttttttttgccttattgtgtagattggcaataagaaccttgaaaatgtcaagagcataattctttgatgttttacggaaactccagattgacaccattttttaaaataccctttaaaaatattattgaaacacatatttttaaaaagcagcatttttaaagtgcctgtcattacaaagttcacaatttaggtagggatataagaaaagaacatatcaaaataatttacagtcactttctatagcttacatgaaaattacagtttttcccagaaggaagaattttatgagaaataaattaggccaaggagaactccggagtttcagtgttcagctgaacctgggagtatggaaaagaattagacagggttaaaagagaaaagggatatctcaaaagtgagaagttggaccaaagttaggagtaagccgactggcagcacaagggagtttctgtgaaagagtggtgggaaacacatctgagaaagaaagcctgacaggtgcatatagaaaggctctaaaatcaggcagaaaaagtgtcatttcttttggtggaaaagaggtctatcattagaaagcacagagcatggggtaagcacctcgcccattagactttagcagttctctaaatttgacctcatagaatatggtgttacaagattttttagtagaaatgtaactcagggaattaaagcatttagattagcggagttgtcactaattacagaataggcatgataattgatctttctataatcactactagatttaattttggtcaaaatcacaaatgtaggttttgcatgggctaatagctttgagaatgttagcacatccactcttccccacactgtgactgttggtcacatgatagtcactgggaagttttgtgtagagcagatattactaggagtcagaaatccaactcaacagaatctttactataggaaaaatttagttaaggatacacaatagaaatatttaaactttgaagagaaaggcaaggaagagaatatacaatctcaatcttaaagacaaaaaaaaatgagcccacaatagattgttaatttttattattcagctttaagaagagagagaaggagggaaacgaagcagggaggaaagaaagaagggaagatgggaggaagggtaaaagggaagggagggcaaaaggaggaaaggaagagagtaaaggaaggagggaaggagggagggaaaggggagggaagggaagggaaggaagggaagaagggaaggaagggaaggaagggaatgaagggaaggaaggaaaagaaggaaaatctctgcatttcatttatttagacaacttttattgtagcttcctatgtgccaaattttgtgccaaggtcacatgtctaataacaagcagaggtccaaagtccactctcttcatattactatcctgcctgacaagtggcattaaaatctatatagaaatcaaatgtcaaaagcagtggatggttagtgagaaccacagaaaaactgaggtcacaaaaacaaattgaatgtactcattcaacagtgcccagagaaaggagcaattatttatactacttctgactcctcaaatggggtacagaaatggccataggaaacactggctaagggacatgcgcactctgattagccctgtcacaaatgcaaaaggaagtgaacggcaaaacaattcaaatccactgtcttctgctcctgacgctttaaattggttatcttgtatattgtgagataagagacttagggaaagagcttgtctgttttgctcatccttccacacctaagtctaactcaggggctgcacataatacatgggtttgaaataggtgaaaggttactttctggactcaagcaatttccctgtgcagtatttgtggattaatgaacaggacaacattggtatgccacatttattctttcgcagcaggctttaattttaaaatatatacctttcattcagtacggataagctgctatcttatacaaataatgagcagtttgtgtactgtaagtatagaggaatcacctaacacttatttgaatatatatgacatcggcttaacatagcgaaaaagtgcctaacactagaatcaaagtcttcggtttgaagttctttgcctgcaatttacagcctcagttttcttatttgtaaaacagtgattaacatacctgcattactatacttgtagaatattctaaaaatatatatagtgtacgaaaattgctttaaagattaattaacataatacaactaataattaaatgatactaataattcacagctgtatttttgtgataataaattggtacctatattgcttcaaattattcaaattaaaatgcatgctgaatagcacctttacttatagattgagtttaattataagtttcatgtgattcaggacttactttacagtgataaattatgtccacctcctagaagaaccaagtactttttcttagtatttatgtcagcattctgaattaaggtcaggctcaacaagacaggccagattctacagatgtagaagagtaactatttgttatgcaacagttattgtaattgttccccaattcccaaagcaatttaaagttggagtgagaggtctgtggaaaggagaaacttctggtgcgttagggacagtgtcccacagacccaattaagaggggtgctgggaatagaccgtgggtgaactaaagctcacaaatggagtaacactctcctgcccacataacttttagaaatagcagc

SEQ ID NO: 405 - DNA, 8060 bp, Homo sapiens
ggcacccaccaccacgcccagctaatttttatatttttagtagagacgggctttcaccatgttggtcaggctggtctcgaactcctgaccttgtgatccacccatcttggccttccaaagtgctgggattacaggcataagccaccgcacccagccgtatttaattattttagatgctattgtaaatggtattactgttttaatttccctttcaggttattcatcactggtatatagaaacacaacggataattttctcatttttgggagggaagaaattgaggctcagaataagttgctcaaaggtgcatggctagtaaggcccaactcagggctcttaattctgaatctatcgtgctgtctctctgaagaggttgcttattgggcccctttaccattttgccctttccctttgactcaatgctcttaattgcaaaataggaagcactgggaaaagaaagaactggagcacagccgggtgtggtggttcacacctgtaatcccagcactttgggaggccgaggtgggcagatcacctgaggtcgggagttggagagcagcctggccaacatggtgaaaccccatctctactgaaaatacaaagattagctgggcatggtggcagaagtctgtaatcccagctattccggaggctgaggtaggagaatcgattgaacccaggaggcggagtttgcagtgagttgagatcgcaccactgcactccagcctgggcaacagagcaagactccatctaaaaaaaaaaaaaattggagcactgcaacagttatgttccgaattttgccagtgtaacaactgaaccacaggaggcagccatggtctcagtgatacccatggatacgttcacatcaaccctctttgactggagggcccacaggcaaatgacagtcaacattgaatttgtgacctcaaaatgccaaaatactttatgagaatgactcagaaatcaagaagctacttgtaacaaatcaagtactgaaatgcattgtcaacacaggacagcctctcatccctgagaaaaggattgtgttaggacatgcagttgaggctaagactcttgaggaactgggtggggtgtggctcaggcttgcttgggagagaagcactttgcagcctgccaccaggctggagacctgagtgtgccaagtcactctgcgtagtctaacagacactggcagtcttgtatgtctacaggaggggatgcatgaactttctccaggaacctgaataccattcacgaacgactgggaaattccctctccccagtccccactgaacagtttccttctctcaaatgacaggattcctgaatctctttctacttccttctatatctaggagatagcacatcgctgcagctgtcactaatgggaacgtggcctgatagctgtggacagtactagcagcattttctcagtctgccttcctgctaccctttgctaggccagcaggattcccacaagggaatactgaagtctgatgaataggagcacatgtgtgcatgagtgtacacacacacacacacaaacacacacacacacagaattgagaacttatggtatattctcccctcaagaagggaagagcattctggctggaagatagtgtcttaggatagcctcaatttacctctgctatctccaatgtgaaggtattatattcccacaatgcgaatcttcctcatacttcctgagaaacctcacacaagaaatgggagagcctatatccttgaagaattacctactgacatttggagtagagaaataagggcctgcctgagcacatgtgtaagttcttccctaatacatgaaatattaggaaaatcccacagggcttcgagactgccacaaccagatattttactcttgctcactcaggaaggtaaagagaaaagcaaaaacaaacaaaacaacacacacacacaatcaaatagaaaataagtgcagatagttcacaaagcaaagcatcgggtgtgctatcaggctccaaggcagctttctctacagcttggacttagacatgttataacagccattttattatgtcacagaaagaaataactgaagtaggtcataacatttcaaattatttttccagtaggaatattatgccctgatgacatagtctagtttcacttcttccataagtcaccagagactttccttaaaatggtcccttgtctccagcctcttgcacttcatgccatcctcatgttgccttatgtattagtctgttctcgcattgctataaagaaatacctgagactggtcaggtgcagtggctcacacctgtaatcacagcactttggaaggctgaggtgggtggatcacttgaggtcaggaatttgagaccagccggggcaacatggtgaaacctcgtctctactaaaaatacaaaaattagcctggcgtggtggcatgtgcctgtaatcccagctactcaggaggctgaggcaggataatcatttgaacctgggaggtggaggttgaggtgagccgagatcacactgctgtgctctgagatcacaccactgtgctccagcctgggcgacagagcgtgactccgtctgaaaaaaaaaaaaaatacctcagactgggtaatttataaagaaaagaagtttaattgggtcacagttcagcaggctatacaggaatcatagcagcttctgctcctggagaagcctcaggaaacttctaatcatggtggaaggcaaagggggagcgagacatcttacatggcaggagcaggaggaagaagcggggaggtgccaaaccctttaaacaatcctcgtgagaactcactcattatcgtgagagcagcacgaggaggatggtgctaaaccattcatgagaaactgcctccgtgatccagttacctcccaccaggcctcacctccaacactgaggattacaattcaacatgagattgggtggggatgcagatccaaaccatatcacctaatattaaccagtaaagattaatatcattcccctagtcaaaactttgagatttccttactatcaagagaattgacccttaattctgtgtgttatttgaggcttcttaccaatcagtttccctacttatctatgtccttattctaactcctcctactcacactttagtcctggattcaaaacccacctcctccacttctatccacactgacctctgtcccctattcctatagcatactcacggtacatctcattttggcagcttatttatcaagtgattactatgtatgctcaagtgaactagatgttttgtgaacactaagagaatgagataaggtccctgacctgaaggagggaacgttgctgttctgtcatgctatgtttcctgagagcaagccatgtatccacaggaaaatggaagtctacaggttcctccaggatgtctctgtgctatgtacatgctggaatttcagaaagacttgctaaattgaattaaattctctctctctctccaattgatatagttgaagtgcaataactaatatgcacttaaactgtccaaagtaacagaactagtccactaccgctaggccatgagcaagtcttccaggggtaagaaaggaaaacccaccctggtgtgcagcccgatcagcaacaaggaaaaagttgctcagtgcaagtctactctcctgtttggagccttgtggttatgctgggttatacttggttgtgcaggtgtaaactgctgaagtgggaaattaagtgtggtgaccaaaagtgtgatgctcaaaggagtgaggaaaggcaaaatgagcagagtggggaagaggagcagcagaaacctcccagagcagatgagcagcagggccatcaaagaaggactggtttccttctcacataaccaaggccagtccctgggaaccacagttcagacttcacatatttgtagcagtaaaggcttgatgttggcaagtttatttcccagacacctgttcccgcaggtaacagcagccagagcagctgccgtgagtgactctgaggtcgtctctctcaaaggtcccgagctggaaggatttggagaagcgcaaaccccaaacccaggttcttctccatggggccccgggatacgttggaaaatctaaccaaagcaggaaaaactggcgggcctggagaacggggcagagatggaacagaagtccccgttgacttcaggcatcccctgtctttcccatcctgagccaggagaaaagtccgcttcctgcagacgacctcagaccaagcaaggtgcccgccgagtctctccttgcaggtccggcccacgatttccactcatctctttcccccgggcgcggggcggcggcaggcggggtcaccagatccccctagcccgggcccctccaggcgccagggacgctgacgctcgcgctcttcctctctcgcctcccctccccacctctccgctccttcgtccagtccctcccccagcctcggcgcaggggggccgggcttggctccgcgaggcccgtgcattccagagagcccagcgagctagagcaacaaaggagccgggtcgccggcggggagagttcggggggctgcggcgcgctggggcgaaggtggctgctgggccgcgggctggcgcgggggcggagccggagctgcactcgcacccccggcccgcgtctggcctccctcgcggggcggggaggtggctttaatggtgggagagggaatggggctggggattgggggcccaggggtctcctagggctgaagacaacttggattgcgaggctagggcttggggagtcgtgcatcccgttccgggcctccgcagcccaacatgggccccgggttccaaagtttgcgaagttgggcgccgaggggccggggcgcgcggagcgtccgggggggcccgggcccggattctctgggcgcacaggtcgcctgagccgcctccgcggccgccgaggtcgtgcgtgtggccggggggctccgaggagcaggcgggggcgccggggcttttgctgagttggcggggttggccatggccgctgcccgcccagcgcgggggccggagctcccgctcctggggctgctgctgctgctgctgctgggggacccgggccggggggcggcctcgagcgggaacgcgaccgggcctgggcctcggagcgcgggcgggagcgcgaggaggagcgcggcggtgactggccctccgccgccgctgagccactgcggccgggctgccccctgcgagccgctgcgctacaacgtgtgcctgggctcggtgctgccctacggggccacctccacactgctggccggagactcggactcccaggaggaagcgcacggcaagctcgtgctctggtcgggtaagtgcggcggagccgggtctggggggcgggaggtgccgcggtaagatgggggcacccttggaaagaacaggctcaggcctgagttttggagagggcggggacagcacccgggagagttggagggacagatcccgaaactttgggggcaggttacgtgcaggatgggaccctcggtcatgggaaaaggagggcaaggaagttgacgaagcgggtcacaaagggcctgagctggtgggtgagcaaaggatggcggggatgaggggcccgtgaggaggtggctctaagccacgggaaaagacattttgtaagaagaggagatgctccacctattctggaagcagggtgccgggggattcaaggaggtgttgaagaccctggggaaattggagttggagaggaaaaggggagggatgacggaggaagaggtttagacatttggagggaagggtagggggacatgatcgagtgaagttttgaaggaaaagaaacctccctagtgatgaattattaaaaggtaaccagaaagttctggaaatcttgatttgggagacaggaatgaagcctagagaactgtgatcttgtctggctttcacgggagatttcattcagtttgtgcatctgaaaaaccggccctctgacgcatgcaggaggttatgaaggaataagacctttctaacagttatttgtgttttctttggaaatttggttaccgaggctggtcagggctgtggaaggacgcttaagtctggagtgttgagagcctgtggacacttccatggtggtttgaagtcccaaagccccctcactggagtggcagagtctgaaaaactgcacactgaacccaaatgtccttccttagcagtgtggagtatactctcccccacctgtcacttttctagatgaggcttggagggtgctgaggaagggagctggccttatcagccctcgcttctagccagtatgattctaaaactgtcctgggaaaaagaaaagaaaaccaggagccaggagcagaactgggagcctccctcttttgacagggctggggtaccccatctcttagctctgcccagggggctggtgaggaccctaatgtagggagtgtatgtaggccgcctgtcattgacaagttctcggcctttgtcagatgttggacaaggccataaggttcctggcttggtgcagatgctggaggaggaacttggaggatggtatccatggtacccatgaggaagagctgcatcctttttggggatcaggttctaaagtcagcacagcacattagacagaaatcatgtgtaaacaacagtggctttgaaaactctgcagattaccatagtgtaaggtggatgtggttttgcatatacacttcttttacgatgtttgcatacatgtgttacatgtatactcatatataagaatgggtatacatagaagataaaataattgtaattttaaagttacattcatgcaaaagactgaaataataataataataataaaaagaacaccaaagtgagattaagcaagattgctttgagcaccacccaaaatgagacttgagtttaggagccagctgtgtggaaagtccaaatctctcagcactagaatctcacccagttctgagttgctcatgctgtcagaggataatctttctgtccctctctttattgattgtgcaaggacccatggtttaattttcccaagttaaatgcatgtttgatgttgcctctgtgtagttaccatcagatcaaggaggaagggtatgaacctctttccagcccatactcttgagagcagctgctgagcagacagaagtagtttaagctggaacatgtatcaattagtaccatctgcaggttgtgcaggttgaaatctcactatctgtgccttttggcagggcagggtcctacagagatgccagcactgagcccagcaccgttagttccattagttcactatgagttcttctctgccaccaaccaccatccctcagctcattcctgtttccatatgtgttctggttgcactctttctgcttgggacttgcaagtagggcagaagcaggtgttggcttgagctgggtaatgagtaggtagagtgaacccaagcctcgtgtgagaatcacagccaggtcagctggtagcctctggcaagtgatttatcatgtcccgagttaatgatcttgattttgcattagacagggtcagtgttacctggctcttaggggtgtttttgtgggtgaaggatgaaggtgatctaggttgtcttcatcggtaaactcttgaatgtaggaactgggtcttcactttttttcaaagcctgtgagtactgagtacacagccatgcttctattcatgcattcagttatgtattgaatgtttgctgtatgtcacatgctgcgcatgtaaggatgaagaatacagatatgatcctctgtcatcaagaagacaggctggacatggtgctcacacctgtgatctcagcactttgggaggccgaggcgggaagattgctcaataccaggagtttaagaccagcctgagaccttgcctctaaaaaaaaaaaaggaagacagataattcaacaggctttggaaatacctgtgaaaggtactgtggcattttagggtactgaaaaagcataaaggacccaaggaacatcccagaagaactggcatttaacccataacttgacacataag

SEQ ID NO: 406 - DNA, 8060 bp, Homo sapiens
ctgagccagaactgccccaggttggaacacggcccgggacaggcccctcatggcgtttcctaaattgggttcccatctttatcaaacttagagtgacattgattagcccaatgttttccttttttacacttcgggcatagacctggctcatattgattaatagcttgtttaaattctttgagtaatttaaaaggaaaaggctcaaatatagctataatatttccctattgatctagggggtgtatcctaacagggaactgccaagcctctatatcaccctctcatctagcttgctgaattcctgcctgaatagaactgagagcggttgctcaaggaactgctttaacagtcactggggcaactacttttcacccagtgtcctctagaaaagaaagatctggagggtcaggccactctttttcttcaaaataatgagggggtgcagaagggtagggatgaacctcttcctcctttgccactttagctttagctggcaaacaaacctgctgttacctcttctgttacttcgttatactttccttccttatcattagtgtgaaaaggttccaaggtggaacaaaccagagcccacacttgtcccactgttaccctgatgcttctgtgttccctttctgactcaccatgggcattgcttaagagtactcgggtgtcctccagcttaattccacattctccaaccgtcgctctggcgaccctttgacctgggatagagccccatgtatgggcaccacttaccgagaccagctcggtcgtggagaccctaacccagcagcgctagaggaattaaagacacacacacataaacatagagtgagaagtgggaaatcagggggctgacagccttcagagctgagagccccgaacagagtttgacccatgtatttattgacagcaagccagtgataagcattgtttctacagattgtagattaactaaaagtattccttatgggaaacaaagggatgggccggaaataaaggatgggctctggctagttatctgcagcaggaacatgtccttaaggcacagatcactcatgccattgtttgtggcttaggaacgcctttaagtggttttccgccctgggtgggccaggttttccttgcctttattccggtaaacccacaaccttcagtgtgggcgtcatggccatcatgagcatgtcacagtgctgcagagattttgtttatggccagttttggggccagtttatggccagatttgggggcctgttcccaacacgtctcaaacaacaacgaaaaccttatgaagcactaccttatgccaggcactttactacacactggtgctataaatagtgagcaggtaaacctctgtctcaaactctaccaaactggaatttcttccaggtggagtaaaccagttctccttaacaaacctgtgagctatccaggtagtactgtgtttgtttcttttaccatcttaacggtttctaagtgtatagttcagtaaagtcaagtatattcacaccgttacacaacacatctccagaactttttcatcttgcaaaactgagactcggtacccattaagtaataactaattgcccctccccccaggccccataatcaccatccttctttctgtttctatgaattttttttttttttttgagatggagttttgctctgtcacccaggctggagtgcaatggcatgatctcagcttactgcaaccttggcctcccgggttcaagcaattctcctgcctcagcctcctgagtggctgggactacaggcgcccatcaccacacctggctaatttttatatttttactagagataggcttttgccattttggccaggctggcctcaaactactgacctcaggtgatccacccgccttggcctcccaaagtgctgggattacaggtgtcaaccactgtgcccggcctgtttctatgaatttgatgagataccttatataaatggaatcacgtacattagtatttgtcttttggtgactggcttatttcactttagcataatgttctcaagttcatccatgttgtagcatgtgtcagaatttccttccttttaaagctggataatattccatagtatgtatgtcccacaattttttttttttgagacagagtctcgttctgtcaccaggttggagtgcagtggcacaatctcagctcactgcaatctctgcctcccaggttcaagcaattcccctgcctcaacctcctaagtagctgggactacaggcacgcaccaccatgcccagctaattttttgtatttttttagtagagatggggtctcaccatgttggctaggatggtctcaatctgctgacccgtgatctgcccgcctcggcctcccaaagtgttgggattacaggtgtgagccaccgcacccagtcgtatgtcccacattttatccattcatacagtgagggacatttgtgttatttctaccttttgattattgtaaatagtactactgtgaacacagatatacaaatatctctctgagatcctgctttcaatacttttcaaaagttatttgctggaaggaaataacactttcatgtgcttctaagtttggctctttatatgtgttaccttgatcattctctcaagcagcactgcccttaatcccaagcaactggagctcttgggcggggtgggggccttattggtcttcctctgcccagagtccagaggatgtgcccacccaccttcctttagatcatgctctaggtacctacttaaccatcctcaaatttgcttccagggcccagataggccttttcctaggtccacccttcctagagtggacctgctagtatgtacagccctagacccaaagggtggctacagggcagctttgtgggggactcatggtgtggatcttcaggctgggtgtccacatgcaggcataggaagcctgagacctcacactgtaggactgagttgggaatggtaaggggcttccatttgtactttttctctggactcctgtaaatattagtagctataatgttgttaagataaacaagtactattgacaaggtctgaagaacatttagttccattactgtaaacctgtttttaactggatgtattttctagaatcagtgtatcactagcttctcagtgtatagtgtctagtcagtgaaccagacggataagatttgctccttagttaaggaagcctgcaccagggtgaaaaaccgttgttgttaatctgaatgaatctgttcttctcttcttttgcatatgtaacacttattaatgcaaatggaaaacacagatgatgcattcgtgcaacaagaggagacaagaaccctgaggcatcaatgccagtgggtagacacacaggcaattcagtaagtacgtctgggatgcgccagtggaggctcggagaggctaatgagcttgttctagctacccagacccacagattcatggctgaatcccagaagcagcctgggagattttgtggggagatgaggcaaagtcatctacttccttggcaaggtaaaggattcctttcaggaatcatcttctacctcaagctgccgtgttttagttaaacatcacagctcagtattgggacagaaatgtagaaggaaaaaaatgctgaagggtcacaagcaaggagcaggtctagacagctgagaggaaccattctcctccaatagctctgtttcttcaataactggccatgtagacccgttctacccccgagggctgggagtcgagtcaggttccagactgaaatgctccctgatcttagcattccttcacttgccatcccacaggcacctcaaatttggtgcgtccaactctgaagggctcatcatcaccccatcatccttttcctgtgctccctgtgttagtcaactgcaggattaactccccgccccccaaccccagtcgctcaagcctgaacattcctcaacaacgcccacaccccctcaaatccggatatttgggcttcctaaatctctacctcctaatctctttcacatgcggtccactcctttctgtccccattgccaaggttgggccaccaccacctatctttgggacaacttacagtcttctaaggggggtcctgccttcggtccgccccacctggctcatctcttttcaacagtttctgcggtcctcacctgcccgagacagcagtctacaatgcgaacacagtcatgtccttccccttcagcggttccccactgcccccaatatgaaaaggagttagaaacccctgccttcccactcccaccgagcaccttcgccttctgaactggccaggggctctgttgcttgctcgttgctctcagaccctttgcgcaaggtgctccctcaacccaaaatagaatctcggcccaccctctgtcggtcttcgccccactgtcagttgttcatttaacaaatattcgctgcttttgccaggctatgcaataaacgctggggttacgcaaggggagcgcaaaacaaaacaaaacagagaacaaacaaaaaccacaactcccaaaagtccattaagacccctagccacagggggcttacatctgaggggttaccgtcccttggcacaaggtggagtatgaaatccgcctctgccttccaggcttttccagtgccaagacctgcggggccaccaattgtgagtcccctcccgcactgactactccctcaacaggacaggagggaagctgaacctgtcgggacaccgcgctgggcacgctcaggtcccaccgcgcgtgctcatcggcggtccctagcgcgagttcggacaggcagcgcccccctccgactgtgagctgggacgctcccgcacgcttcccggcaccccttcagtcttcatggtacaccccgcccgcaggtacccggacggcggaagtgagccgcgggggcggatcttgttgttacgggtaacggaagtgtggcggcgttgggttgagcgggctttttggaagtttgtggcggaggtgaggccgaggtgactgcagagcggctcgcgaggtgctcgggctgtgggactgggcccctgggagggagcggttctgtgggggaaaggaggctcctgtcctgacttggcgttctggtattttctctggcgtggaaagtaggcgcgctccgctgtctcccgccgcctgcctcagctttcgcggttccctcctaggggtgtgcctcagtcggagccccttctgttaaattcttcccccttggccgagggtgagctcttacttctgagaaatttcccttaaccttgctttgcatttgttgtccggtcgcggtctccatcaccagctgcttcgtgttatagtttttgtatttgcgctcacggcttgttaactgaagaacccggaagggaaggccgcggcgtttcccgccggcggggctctgccattctcggatcttggcttcagatctctgatgctccccagcgtctcttggcaaggaatctacttcgcgttcagggaattcacagccacccgcctctggtcttacctctggttttaggatgattttagcaaatgtgcctaggttgatttaaacgtatccccctccgaagccgcctgccccttctggctggacacctttttaggttggtgtgtcctgtttgcatccggtagttcaaagcatgggatcttggagtccggagctggacagactcgggtttcacttctctctctgccacttggtagccttctaatcttgggggaaattccctaatctctgaatcccaaaagttgttcatctaaaatggggctaatattacacctacctagtaggtggtgttgtgggagtcatgttaatgaatgtaaagtgctgggttcagtgttttccctattataggggttcaataatttgttcaacaaacatttgttacctagtttgagctaggtactgtgctaagtgctggagatacaatgataaacaaaaccagctacggcccgtgtccttaggggacttatagtctagtgggagataacatttgttaatctgataattacacatgtaatattaaaaattggtgacagtatgtaagagagtttactggtgccatgagaggatgtactaggggaacgtttaacaacctatactgagcttttcttttcttttcttttcttttttttttgagacagagtctccctctgttgccaggctggagtgcagtggcgcgatctcggctcactgcaacctccgcctcctgagttcaagtgattctcctgcctcagcctcacaagtagctgggactacaggtgcgtgccgtcacgcccagctattttttttttttttttttttttttttttttttttttgtatttttagtagagacggggtttcaccatcttggccaggaaggtctggatgtcttgacctagtgatccgcccgccttggcctcccaaagtgctgagattacaggcgtgagctactgcgcctggcctagactgagcttttgaggagatgtggattgagctaagatctgaaggatttgtaggaattagtaataaaagattggggggcagtggatggaagcaggaatatttatttaagttccagatggaaacatgtggaagggcctgtggcagaaagaacttggagatttgaaggactggaagcaattctgcatggctggagcagagtgatgaaagggaggtaggcatgggtcagaacttgcaggacttattttatccttacttaagggttttggactgataaagcaatggaagccactgaagagctttaagatgaggatggcatggagggaagataagtcacataatcaggtttgtgtttcaaaaacatcactttagttgctgcgtagaagggaacaagttaggaaacgattgcagtagttcaggtgagagatggtggtggcttggggtaatgtgtcagtagtggagatggagaaaagtagacagatttgggagatatttagtaggtaacattgacaggacttggtaatggatgtggtgaaggatgaaggcaaagttgttaagaatgttacctaggtttctggtctgagcagctgagtggatgatggtaccatttatggagacgggaaacacaggaggaagaagaggaggaacagattttctttctactaggctgtacttcccccttctattttcatagctactcactgaattctatctgcttcatgtgcctccatttcatcccatcttttctgttctccagtcaccaccctagtacaggtctttatcatttccactaaaataacttccaaatggtctcttagcatttgctgtttcttcttaccttctccccactttaatctgcacaaagatgctaggttctgtttcctcaaacacttgcaatcttgtgagattgtcttttgctcaaattttttaatggttctcagtaatttacgaaatagaatctaaattccttaacctgtttacttccagcctatctttccagacttcctactcactattttcctacttggattctacctcagccattttactcattttcccccaaagaaatttctcatttcccgtatgaatgcctttgttcatgatacccttctccataatgtatacaacctggttgtctggactacctatatttaatctctaagttccagttcaagctttcctctgctgcgaaaccttgacatttaagaacacagttacatcttttaccttgttaacttctcagcttttctttctttctttcttcctttcttttttttttttttttttttgagacagagcctcgctctgtcgcccaggctggagtgcagtggcgtgatctccgctcactgcaagctcctcctcccgggttcacgccattctcctgcctcagcctcccgagtagctgggactataggcgcccgccaccacgcccagctaatttttttttgtatttttggtagagacgggggtttcaccgtgttagccaaaatggtctcgatctcctgacttcgtgatctgccctcctcagcctcccaaagtgctgggattacaggcatgagccacggtgccggcctctttttttttttttttttaagagacagggtct

SEQ ID NO: 407 - DNA, 8060 bp, Homo sapiens
agatcaagggaagaacctgacaatgggccaagtgagaggtacatggaaagctatcttctaatacataagctggttgcttcaagacagtctcagtaccctctagataaatcctaaccctaatgctccttcatggatgatcagagcagtaaaaacagttaactgtcagctggccgctgtggctcacgcctgtaattccagcactttgggaggccgaggctggcggatcacgaggtcaggagattgagatcatcctggctaacatggtgaaaccccgcctctactaaaaatacaaaatattagccgggcgtggtggcgggcgcctgtagtcccagctactcgggaggctgaggcaggagaatggcgtgaacctgggaggcggagcttgcagtgagccaagatcgcgccactgcactccagcctgggcaacagagcaagaccccgtctcaaaaaaaaaaaaaaatagttaactgtctgactccaataagaacacagaacccagttttccactgcctctacccaggccagcagccatcacctctgctcattatcttggggccacatgggggaaaggtatcaccttgcctctgttggcactgtccttacttacttgtgtttgtggttaggtaagacaggaatgatggaggagtctagggaggaacttataaggaaccattcaagactcacccattttccccttttttcagcttctgagcagcagccttcttggacaggctgatctgtgaatcaagcttcttaaggaaatcagaggcagagaggtcatggatgggcgtgggggtttcctggccaggtgtggggaggacttcaccattggcacgtcctgctcctgtctcttgtttcttcctctcagttgagtgtggccaaacttcactgttacttgggtgtactttttcctctccatctttctcttcctcagagtccaaaccattgaacaggtctctgggctctgtcaggatggggatgtagagggttttcttcaggaagatggagtcattagtataaaggcggtttgcacgtttaatctgttccatcttaaaaaaaaaagtcaccaaaattaaggacagtaataatgatcaatcttacatcttgagctttttaaagtgactgtacagagtcttctttgattccataacaaccaagctaaagtacaaagggctgacattatttctattctatagatgagtggttttcacactttttggtcttagggcccccttacattttaaaaaattattgtgcaagccaggcgcaatgtctgatgcctataattccagctactcaggaggctgaggagggaggatagcttgagcccgggaattagagtccagcctgagtaatatagtgagacgccatttctaaaaattaaaaaattaaaaataaatgaataaataaattaatgaataaataaaaatgaaggaactgaggctcagagaggttaagctactttcctaaaattatctatcaagttaatgacagagctagaatgacaatcctgggtcttttcactgcttctgagaatgcttttcacactatactattaacaatgtcattaataaatatttattttgacctatttattcatcactggacatagtgactggcatcaccatctatctgcctggcctcccaaggtagaaacatcaatgtcatccttaactaatacttgcctttcatcaccataccaagtggtcaacaaaactgcttcaaaaatctctctcacatctggtctcaccttcctactgccaaagatttaaaatagaccctcagtatttctcatctggggttattgcaacagtttaactggccttcctcgctctatttctactcatcctcctcttggcatctatctttctaaaaaaataaatctgattaacccactacccacctatggctccgcactggctaaaagataaaaaccaaattagcattcaagggctttctcaatccagctcccaaaggaaatgtctagattaatctccctctgccacctctacattttgctatcctgaactttttatttttctttgaacattccatgatctttttcacactttattcatgctgttacttctgcctgaaatgctcccacccccctactatcccattctctgcttggaaaacttgtattcatcaactatcactccctttgtgctaccttcttcagggctcccaatgcatactgtaaatattgctataataatacataaccctactataatattattcacctctttaaatatctgctttgcctaaaccctataagtcctttaagggcaaggattgtgacttgctgtctctgtatccccaggaagtcattagcatcctacagaccttgacacatagcaggggctcattaatgctttatttaaaaactattacttataattatgtaattattatcataattagataatgaaatatagaaactacagatatagtgtattcgtattttctttctttctttctttctttttttggagacaaggtctcactctgtcgcccagcctggagtgtagtggcgcgatctcggctcactgaaacctccgcttccccagctcaagtgatcctctgcctcagcctccccagtaggtgggattacaggcacatgccaccatgcccggctaatttttgtatttgttgtagagatggggtttcaccacattgcccagaatggtcctgtactcccgagctcaagcaatccacccacctcagcctcccaaagtgctgggattacaggcatgagccaccacgcctggcccaccacagcccctttccaactgaaatttaatcttttctgatttcctatctttgtgtgtgtgtgtgtgtgtgtgtgtgtgtgtgtgtctcactctgttgcccaggctggagtgctggagtgcagtggtgcgatctcagctcatcgcaacctccccctcctgggttcaagcgattctcccgcctcagcctcctgagtagctgggattacaggtgagcaccaccacgcccggctaatttttgtatttttagtagagacagggtttcaccatgttggccagactggtctcgtactcgtaaccttaggtgatccacttgcctctgcctcccaaagtgctgggattacaggggtgagccaccatgcctgacccctattcgttgttaatacctttacaaactcaccacattctgtcacttgtaatcattatttgtgtccctgttcatttctcattaggccataaattacatgaggacagcaaccatatagtttaagtttctatctcccagaaaagttatcacagtgctttaaatacagcaagcataaaaatgttggctaaattcaacatttgtttgagtgagatggaacaagaaaacaggggcagggatagggggagtaaccccatcaacttcaatgctgtacatttttacatctatccaatttcccccatgcatgacctgaaatacttggtgtagagtacctgttttgcacaaaggaggccaccttactggaaagaaggcagagcattgaggaggaaccaagagcaaggagaggtgggcactttaggaactgagaactaaaaatcagctctccattagttgctgtaaacgtttaatcactctcaacataaaattttctgtgtggttaatagagtcagacagacctgtttgaatcccaaatctgacgctcattatttgaccttagccaaactggttaaccaatccaagtctcagtttcttcatctgccaaaagggaacgataaatgtatacttgatacagatgtgagggtgaaatgagctaacgtatgtgaagccctcagcacagtgtctggcataataaaataggagctgttcctctccgttggaatagtagggcaggacttgtgcaacactgtgatgggaaaacaaagataaaggcagaacagagtgcaacacattaggaacatttcaggggaggttacctagaagggccactacattcttctcaggactaaatccctcctgactgttgtcttcaccccaatcctggaaaactcaccgtcaccccatatttgagtgctagtccagccagggtgtctccgggctccaactgatgctccaggcgtctttccctcactggggagcaggccgattgcaccaggcttccatatgaacgagcccggctcccttgaagcagtcctgacccccctggcgggggctgtctagacggggaagccatctcttcaccctgccaacagctaaggttgcaactaggggaggtacgaccgagactgcgactgacaggcctgaagtctgggaatgaatattcaggggattcctttccccctctctcttcccctgtgtccccgcctccccagcactacgccatctgccccctcccggtttctcctccctccaagctacttatccacaaatctgtcccttgagtattcagtccctccctaattctcccctaagcacccctccgactttggactcccccacaactcctcgctacattgacctctgacctttgaactctagaaataatcctcaacactctttcctcagtttgcccccaagtagcctggcctcagggcgctccaacatcccagctctccccggtcccggggtttgtttgctagagtcaggaacaaatcaggcccaccccaggtgaactgtcgccgcagacgaagagcgtgaggattgcaagaatttgtagtacaccttccactcagagatcctcaaaggtccgctccgcataagataggtcacaccctcaaatttcggctccacatctaggttgttgtccctccaaacgcctcagatccgccaagatgcaagggcctggatccagttgagcggcaaggtctttgagaaaagacttcatttcccaaaaggctccgcgtctgcggagtcgcagggcaccataggaaatgcagttccctccgagcaccagagagtggatttccggatcgcgcaatgcatgcgtggaagtgcgtccccggaagtacggaggccgacaggaagagaaggaaaaaagagaaggcgctgtcccgctcttgctacggtggcctggaggagtggcgaaaccggaacagagaatttatcacttctgggactcacagtcgtgatgtctttcaagagggaaggagacgattggagtcaactcaatgtgctcaaagtaagcgtgagcggagaggatctggagccgcttcagtcgctccctgaaggttgggaaggagctttgtttcattgctctggcaacaactcgggggtgcaggagagaaccaggcgacttagagctgtgtagtgactcctttttcggtctatgatcgctgttctccccagggtccttattccatttcactcctcatttctataatttcacttccacccctctctcctatcccgctgatcccgtccggatttcttcccctactccctgcagaaaagaagagtcggggacctcctagccagttacattccagaggatgaggcgctgatgcttcgggatggacggtaagagcaaggagtggctcaagcctgagggttctgcggttagaggctcaatagacttttttttttttttcctttgagacggaggtctcgcggtgctgcccaggctgccctcgaactctagggctcaagtgatcctgcctcctcagcgtcgcgattagctgggtttacaagcgcatgccaccacgcctggcttcaacaaacttttgttattaattaggacagcaggagtacctaggattctttggcggccagtgaggactggaagaagtggagattgggtcaccagggagttgggttttgcaaagactgctaggacagggtgggacctatggcagggacgggcccaaccctcttcccctggaccacttatcctcttctctacccctgctcagctttgcttgtgccatctgcccccatcgaccggtactggacaccctggccatgctgactgcccaccgtgcaggcaagaaacatctgtccagtaagttagggggaagacgggatggggaataaaccctcgaaatctctgcacaccactcttggtgctatgcttttaattctgtttccctttctcctcaggcttgcagcttttctatggcaagaagcagccgggaaaggaaagaaagcagaatccaaaacatcagaatgaattgagaagggaagaaaccaaagctgaggtaatcagagagtggagagtgtgttctaggcaagaccctgctgcacacaccaggctggaagggcggagggctgaaggctctgactctgtctcccatctccttaccaggctcctctgctaactcagacacgacttatcacccagagtgctctgcacagagctccccactataacagttgctgccgccggaagtacaggtatgggacgggaaagccagaggtaggaaggctcagaaggagacagatggctctaaaagagttttccagtgtgtattctgaggaatactagtgttctggagatgttacttagtgtttcaagaaaaggagaattttggctgggcgcggtgactcacgcctgtaatcccagcacttttggaggctgaggtgggtggatcacttgaggtcaggagttcaagaccagcctggccaacatggtgaaatcctgtctctaccaaaaatgtaaaaaattagctgggtgtgtggtgtgtgcctgtaatcccagctactcaagaggctgaggcaggagaattgcttgaatccgggagacagaggttgcagtgagccacggtcacaccacttcactccagcctgggtgacagagtgagactccatctcaaaaaaaaaagaaaagaaagaaaaagaaaaggagaattttgtgatttttaaataaagtttgggaaatggcactttgtaattctacttgaagaataacagttttaaaaactatacaaagtcttaagattaaaaaaaacttgtaaaattttaagctagcctttcccaaattcatgattctgaaatcctttgtatgcagaacttattaatatcttgagaaatatagtttaagaagcactgttttaagaggttgggagtcataggagagttggccctttcccttactgcttttacagactattcttctctacctagaccagaagcccctggtccctctgtctccctttcccctatgccaccctcagaggtcaaactccaaagtgggaagatcagtagggaacctgaacctgcggctggcccacaggccgaggagtcagcaactgtctcagcccctgcacccatgagccccacaagaagacgagccctggaccattatctcacccttcgaaggtgagtatgcctaatcagtttcctcagattttcttttctctctgacacccttgtttcaaagctattgtttttcctttttttttttttgagatggagtttcactcttgttgccccagctggagtgcaatggcacgctctcggctcactgtaacctccacctcctgggttcaagcgattctcctgcctcaggctcccgagtagctgggattacaggcatgtgccatcacgcccggctaattttgtatttttagtagagacggggtttctccatgttggtcaggctggcctcgaactcctgacctcaggtgatccacctgcctcagtttcctaaagtgttgggattacaggtgtgagccaccgcacccggactcccattgttgttttccatctttggtttcgttttgttttagccacccaacttacatggctctcaattttttctcactgctaactttttttttttttttttttttttttttggtagagacagggtttcactatgttggtcaggctggtctcgaactcctgacctcaagtgatccacctgcctcggcctcccagagtgctgggattactggtgtgagctcaccactaacttcttaataagcctctttcctgatcgatgctattttctctgatgtttccagctctggatggatcccagatggacgaggtcgatgggtaaaagatgaaaatgttgagtttgactctgatgaggaggaaccacctgatctccccttggactgatacccttttcccattcattcacaaat

SEQ ID NO: 408 - DNA, 8060 bp, Homo sapiens
tacagccattgctctttcggtttggtctggctggcaaaaaggtggcgttgttatgtaaataaaatccctttagcagtgaaaatttaaaaatcttttctctgttttttccttttgctggccgttttcctcccccaaccataccgccttttttgtgtgtggggggtagacggttgggtatttagccgcttcagaggccttgttcccataatttagagttccccttcggatttcgccaagtcagaatgtgtgtcggacccaaaacgtgctgcttgcagacctagcttttcagggctgttaccccccgaactggttgggttcacccgtgtggtggccacctggcacagtgtcagaggctcaaggtgcgggaggggtcacctccttatatgcacctgccagctgagattagactctaagtatgttcttctgggggggaaacctatttagacccactgcatgtcttaggcagcattcctcccagacaccctcacgtgattctcagttgtctgagaatgccccgaaaagctgaggggaggcaggtgctcttatttcttcagaggggaagattctacactcatgagctagagggtttggagttggtcaaatccgataagggaaaggaccaaaacacacaaaaaaaaccccaacaagacagaaacaaacaacagaacaggtaagcaaaactaacaatgatcacacaaaatacatgacttctttttttttttttttttttttttttgagacggagtctcgctgtcgcccaggttggagtgcagtggcgcgatctcggctcactgcaggctccgcctcccgggttcacgccattctcctgcctcagccttttgagtagctgggactacaggtgcccgccaccgcgcccggctaattttttgtatttttagtagagatggggtttcaccgtgttagccaggatggtctcgatctcctgacctcgtgatccgcccacctcggcctcccaaagtgctgggattacaggcgtgagccaccgcgcccagcctatgacttctgaacgctctaagtgtaagcagaaataaacaccagctggttgttaatgttatctttagtcatttaaaaagaatttgcaagacaaaattccaaatcaattttcttacctagtgatggggctcaagctgaagacggctatctgtcgatgcagaagcaggcaggcttgccttccttgatgaagcgagtgggaactcccaaaaaaggagttttttaacagcaaataaacctcagaccccccaccgaaaaacgttggaagatcagggatccctggaggaacaaggtcccagatttcagcaatcatcctaccagtttgggcaataaggtgccaagccaataccgaggatcaataggcgaactgctgcaggccgggttaccttcactgaggatctctcagtgcttatcaatgtcaatcgagaaaaatgacaagtcttaatcatttcaggaggcttatttcccaaagttaaggacgcccatgacacagcctccggagatcctgacgacgtgggtccaaggtggtcggggcacagcttggttgtattcattttagggagtcacgagatatcaatcatatgtataataacaggccggacagggcgcggtgtctcacgcctgtaatcccagctctttgggagacagaggcgggcggatcacgaggtcaggagattgagaccatcctggctaacatggtgaaacccgtcactactaaaaaatacaaaaaaaaaaaaaaaatttgacgggcgtggcggcgggcgcctgtagtcccagctacacgggaggctgcggtaggaaaatggcgtgaacccgggaggcggagcttgcagtgagcggagatggtgccactgcactccaggctgggcgacagagcgagactccgtctcaaaaacaaaccaacaaaaaaaaaacaggccgggcgcggtggctcatgcctgtaaatcccagcactctgggaggccgaggcgggcggatcacgaggtcaggagttcaagaacagcctgaccaacatggtgaaaccccgtctcaactaaaaatacaaaaattagccgtgcgtggtggcacgcacctgtaatcccagctactcaggaggctgaggcaggagaattgcttgaacccgggaggcagaggttgcagtgatctgagatcacgccactgcattccagcctgggcgacagagtgagatttcatctgaaaagaaaaagaaaaaaaaaaaaaaaaaaaaaaaaagaaggacattggttctgtccagaaaggcgggggcaacttggaacagggagggggcttccaggtcacaggtaggtgacagacaaatggttgcagtttctgggtttctgataagcctctccaaaggaggctatcaatatgcatttatctcagtgagcagaggaatgactttgaatagaatgggaggcaggtttgtcctgagcagttccgagcttgtcttttcccttagtttagtaattttggggccccaagattttcctttcagaaaaaagaaaatgtggtatatatacacaatggagtactattcagctctaataaaagaatgaaaccctatcatttgccacaacacggataaacctgaggatatcatgtaagcaaaataagacacagaaagacaaatacctcatgatctcactcatgtggcatctttaaaacgaagttaatcattaagatatttaccagttgtctgaggtattgggttgaattttctttttttttttttttttgagacgcagtctcgctctgttgccaggcagaagtgcagtggcgcgatctcggctcactgcaacctccgcctcccaggttcaagcgattctcctgcctcggcctcccgagtagctgggacgacaggcacccgccatcacgccccgctaattttttgtatttttagttgagacggggtttcaccatgttggccaggatagtctcgatctcctgacctcgtgatccgcccgcctcggcctcccaaagtactgggattaaaggcgtgagccactgcaccctgccttccaaattaaaaactttttaaaacctcgtacctcgccgtgggcggcgaccgtcgcggactcgccgggaagacggccccacggagccgggaacaccgcccgctgttcgtatgtccgaggtgacgccccgctgtggcgggctggcggaagtgacgcgctgctgtggcgcgccggcggacgtgacgccactgtcgctgcgacgataaggcctggcgttattgcttagaggcggctacctggagccggaagcgcggctgcagcagggcgaggctccaggtggggtcggttccgcatccagcctagcgtgtccacgatgcggctgggctccgggactttcgctacctgttgcgtagcgatcgaggtgctagggatcgcggtcttccttcggggattcttcccggctcccgttcgttcctctgccagagcggaacacggagcggagcccccagcgcccgaaccctcggctggtacggacccctccccggcgtctccgctcccctgaccccacatcccctagaagaccttttttctgagcctcgctgctcggatttcttctcggcgctccccggtggtctcttccattatggtccccacctcagaaattttttttaaccgctccagcgtctcttttctgtattcttacaactttgtggcaaccacctctactggccccacttcgaccttccttcctgatcaccacaaagtaagctgtgtccatacctgggatccagcctctccacttctactcgtccagagctcccgcccctttcctgagcagcctttgggtcactccccgttataggcgccctttttgccccctagcacacaacagataagacccctgccgatcccctcgcgttttggtctcttatattcctccaagatgttttccctgcctaggggctaaggcctctctgcgttaggcctcttcctaggcttcacctacccagccatatacagcaagtaaaggcgccctggttctggaccacttgcacacatcgccagccgctgaccatgtaaacgcagtatgtaaacgcccagccatcccgtagctgcagctctgcgttttaggtcaagctccctaaatgtcccattccaggacccttacgtagggattctcctaccccagtactcttcaccatactgaggataattcactgcttgctactgtgggtccctaagattactcctgttaacccccgtcctttccccccagcactacctaccaagtacaagtcgcctccttttgggttgggttatgtagatatcgcagggtatgtgctggagaagtaggtagaagctagattgtgaaggtgcttgatgctaaggaaagtttagagttcaatttccttttttttctttcaaacacttaggagccagttctaactggaccacgctgccaccacctctcttcagtaaagttgttattgttctgatagatgccttgagagatgattttgtgtttgggtcaaagggtgtgaaatttatgccctacacaacttaccttgtggaaaaaggagcatctcacagttttgtggctgaagcaaagccacctacagttactatgcctcgaatcaaggtaagtttgccttaatgttttatgaatcatggtttggctgttttgaagatttagagggggtctctgtagtctttcgcttggagttgcaattttaagaaagtggaaattttgtgctgtcagttggctggggcaatagaatgttgaaggagcctcacacgggatggaactgagacccatcatttgtgccccatgtcaagtagccaaagctcatgcttcatggcaaatataaaagatttagagcaagatcatccaggctaacctaccccaagatatgccattcttggtgacctgctttcttctttaatcgtcactgggtcatttacaatcttagaaggagcctttagagttaatctagttcagtctctagactttatagataggaaagcaaactcagataagttaaatgtgacttctccaaaattatccaccagtatacataatgatcaaatcagtatgttccggcctcaacaattaccactgtttccaccatatccttcaggtgtccagcctactgacagcagctttgaagtacatagtgcatttcccaagaaccgtgggtaaagaaaaaagtaagcctttattgattggctcaaaacttttgagcaacgactatgtggtgatacttcaatgggtatgcaattggggaaaaaatagtatctctgccttcatgtagcttttagtctttagatatacagccactcaacaaaggagcatatgaaaacatgcagttgtaaagtgtggttaatgcatgatgagaaagaacaggatgtgatgattagtgggtgagaaagcctggctgaggaaattgcatttaaactgagactggaaggatgaataaaggtggggacagaaaggagcagaggggttgaagtgtgtgagtgtatcgcatgtgagcgtggcataaagtctctgacggagccttagctgtgttgttgatcatgtgaaacattatttggtgagaaggagctacttattgatttaaggcttgggggcagccccatttgcagatgcttggcagatgttcactggatgaaagcagtctgagactgaaggaagcacagtgccatatcactcactgactttttccttgaatttcttactctctctgccgcatttcaatgtgatgtgacttccttcagcaatatttattgagcatctactgtgtgccacactgttccagacaggagggaggcagtgaagaacaagacagcattgtcctcatggagcttactttctaattggagggatagaaaatcggtaaaatatgaatcaatgaagatggtttcagacagtgacaactgctctggaaggaatggagagggaggtgagagagaatgaaggggagaggggcatgcccggcacctttgaacacagcactcagagtttttgccgtcctgctgaaactagctgtgggaatctggaagaaagacatccagcccctgattttcaggaacaccggtttctttatctgctctatcagaagtgtggaaggaacccttttctccttttcttttaagatttaacaggcagatttgagaaaatgtataagtgattgtgcaggttctaggttctattcagaccagtccgttggcactgtggttcttggggcctctgtctccagcttattggttttatttcacctttgctggggagcctcaccccagagctagtgttttgtttcattttcagtcctttgaggattcttgctccttatttccccatcagggaggagctagaacagaaagcccatactggagttaggattgtacagctctggagtttggtaggttggggttgggcagtgttggttgaggaaagtgtcccctgccctgcctccagtctgagaaagggctcagagcatctcctggtgttgatacatttgtaaccagacgccaaccctgacatgtccagtgtgctttcacttgctaagaccctgcagcagctttgttttaaagtcatgtaactcatttttgaatgccttttctttcttaaagaactttctggtcataataatagctggcattgattgacagacctgagctttcccttagatttcttaggactgtaaatgcagcccactcgctgtctgcacgctttctgggatgaggggatgccaagtagtccctaccctctttaaaaatatcggtgggaacccaagctagtgtgaggatgagggaggtgccttgtaaaagccacaaaagaagggatgaaaacagaaaacttttatattgtcaaatgttgtaaacaaagtcaacaacatgataaactgaagaaattattgacagtggacatggcatacaagatgttaagtccatgatgtataaagaggttcggatcaaggagggacagtcctatggaaactgggccgagtatataacggaatccaccaaggaagaaagcggaatggccaataagcatatgcagagattcttgactagtaatcagagcagggcaaacaaaacaacccatatgccagtttttgtttatcatattgtaaaaatttaaagattgatgatctctaccccgcacaagaaacgaggtgaacaggtgctcttgaaatactgtggatgtgaatacaggttgactgagctggtatctccactgccaccaccgtcgtccaggctgctgtgggctccagcctgaactgttataaatgccctagcaccttttcttggcccaaatcacttctggacacaaatcagaccctgctacactactctttaaaacccttcagtagtttacgctctgcccagtttgaacactgaaccccatcacccgtccctcaaggctctgcgtggcctcactcccgtttacctcttcatcctcatataggcccccttccgtgttcccttgcccttcatccacacaggtcacacgcagctcatttcctcccgggtgctgctgtcttttctgcctggagcctttgcagtttgcaggtgttttactctggaaagtcccacctcacctccacaacttttcaaccttcaggtctcagctcaagtggcacttccataggaagctgtttaaaataaatgcccagtaaaatggtcttggttaaatacgttattgtacagctacacactggaatgctctgtagctgtttggaaaaaagataaaatgcttgtgttttccctaggtaaagatgttcatgatgtgttattaattgaagaagtttgagagtaatttgtatagtttgctaccattttggtaaaaaatgtgtaccttcatatatttgtgattttatacacacacacacacacacacacacacacacacacacacacagaaaagagtccaaaaggatactcaccaagagtaattggctgccttttaaggagtacaattttggggtgaggttcacattttaaaaaataactattgaaatataatttttatacaattacatttttgcatgtacagcatttaacaaatgtgtgtatccaggcaaaccccac

SEQ ID NO: 409 - DNA, 8060 bp, Homo sapiens
gtttgtttctgaaatgaagaatcaagctttggtcattccggaagtcgtgtagcatgctccaatttgaagtgactgagatcttttgtgacttacagaggagaaggaaatgttttaaaaattggcttatgccagtctccttactctgaaattctcaattttcttgtattacaggataaatataaatatcatctcaccaaattgtaccagcattgtcctaaacatttaaattttcctttatttttggcctttaaaattagaaaattttctccagttgctgcacttagctttttaattttgttttcttttcacttaccagactactggtatgatctctttcactgcagtatgattgctgctatggtcacttttagaggagattgtgggaaggttaggatttggaggaaacatgacaaaaaagggaagaaaaaaaaaaaccttcatttgaccacatctggctgcttgtatatttaaccagttctagaattagaaaacctttctgtacattttcttctatttttctcacttttttccttacataatgaaattaaaacttttggagcctacagttgacatttttcagaaaattgagttatcaaggcagtaattatttcacggggagataaaactctcatagccctaactgtcaaatagggcccttttcagattttaattacaaaataaaattagtctgctcttcctcagaatggtttgtgagtggttaaacagagctttcccccaatactggtggtcgtcaaactctgctaattagcaatgctgagaaattccagttaacaaggacattctccaagactctgcaggttccctgccgtttgccttcatttccataagaagattaagagaggaggggaacacactcaaatgcagatgcagaaaagaagcgttttttaacaagcatcataatagtaagatgcttggctagttctcacctaattactgcaagttaaacctctatttgacactaagaagaaaaaataagtctacagtcccctgtctccacaaaattgttagttggtttcagatataatacttgaggagtgctgaggagactttaggagagaaaaatcaatgtgcaagattttgaaataaaattgagttacacttaacagttaaggccttttggctagggcctataatagaacaaaataaaatcagaatattccaggagtcatgcatttttgttactaactactaatcttgctctaaaagtatgtagctttttgttgcccgtggaagggaagtgttacactccctttagattaagcactttcaattttcgtaaattgtgccaatggcaacattttagattctcagaggatgaagcatcctgttccaagtcttttttgattgtctagtagtcaatggtatattgttgttagtactgtagctgtctattacaaacctaaaacagtgttgcttctgtcatctattggaatcgttatagttattatatttagggatcagtgatggtgctggattgaaatagagtgggcagtgatctgattttttaaaatgcatatgttctaaaaaatctaatgagaaaatgttcctgctatcaccatcttctttaatcttattttcatagcacattattatgcataatcgccagccacagttagtttattgtctcgataagtacagcaggcttaattaaaataaagctgtaaataaatgcaaccaatgataacacaattgtaacgtaattccatagcttattaatgtgataaaagcaattaataaaagacctagccaacccctttaacctcttaaatacattattatagagttcatgcacaaacacatgcatctgagaatgtgtaaaagttgttatatatcctcccaaggaaaaaaattgtgccttgagagaaaggcaacgagatttaaaagatttgtgtctataaccgtctgttattagtatttattttaacaaatatacaccacccttatccacaccaattccttggttgtttcttcaaacaattatccacaagctttttaaagtttttagaataatgctattaagcagaccgatgcatacacaatcataaagtgaattcttggtctgccctttgtggcgtctggacaatcataattcattcacatgttgaatctcataatttgtacctattttttcccatggtctaacctcccacttacctcgaggttgtatgtatatttctaagttaggcaaattaaatctgattcttatgatttggttccgcagcttataagatatgttaacttttcttttgtttagattatgtataattagtctgatcttccatccccctcttttttttttttttactttaattattttcaaataccttcttttaaaggtaaaagcaatagtcttggaaaagcgaatctaccagcagggggcgcaccagccacatccctgaaaccagccgcgctgaaaagccggtggccgccttctcttccccagatcttctcaaccttttctctttcctaatctccaggtccgtgtttaccttaatattacacctggattaaacagaaaacagtgctgtattttgaagagcgccgaatatgtatgcattttgagaaacccaatctcaccctttccgggttcccaagaactaaaacaagccataacttgagagaaaaaggagaaccttcggggggcaggaaggttgattggaaataacttaaggaaagtctgcagaattcttttttttacaacttttctgagtttccagtgggtatatttagtgtgagtttgacagtaacaggctagggagggcagagattggagaaattgggggtcgggggagtgattatgggaagaaggttagtaaggaacaaaacaatgcaccgttttgtaaagataataaatggaacgtggctggtagatactattcagtacattttcttagggtgagtaagggtagaccaggggaggagggggcggagagagtgttacagaagaaagaaaataagtaaccctgatggtttaagccctttataaaaaagaaatggcatcaggtttttttttctttattcccccccaccccaccctttgtagtcaagtgcattttagccacaaagatcccaacaagagagtggaaggaaacttagacgaggctttgtttgactccgtgtagcgacaacaagagaaacaaaactacctatttgtaacggacgtgctgccattgccctccgcattgagcgcctacctattgaaatctttacgtcgggacaatgggagagcggctaaaattaccctcttgggtcctgggcgggcaagattcctgagcccctacccccgcccccatctcatcctcctctaacccgggccttgctgggctcccccttccccagtcccggccgccttctcccagtgtgcgctgcctgcacctgtgcctggagagcatcgaccccgcctcccaggccttgagcccctttgcggcgcagccccagccttgcgcggcctgggctttgcggccaccacaatggaaatctacggggaaaatgccagggctggttctgctggagtcctgggaactctgcgtgggagggagtttgtgactgcggcccaaaagccacctccatacagtgccgtgggatgccaggaagttgaaatcaccctcccccatcgcctgcacttttgagcgcccttccgtctgtgtctttccccagcccccatttgaaagccgcacgaccgaaacccttcttacggggaggcatgggatgggaatggggagtgggggcagacagtagaagcatcccctttgctacggttgaatgaagacagtctagtgggagatgtggctggggctaagaggaagagctgcagtttcctgggccaaagagctgagttggacagggagatggcagcttaccaaggcctgctggttctcagctctagagtctgccttatggtccgagcaggatttatttttaagaacagagcaagttacgtggaagcaaggaaggttttgaggacagaggtttgggtctcctaacttctagtcgggactgtgagaagggcgtgagagagtgttggcacctgtaaggtaagagaggagagcggaagagcgcagtacgggagcggcaccagaggggctggagttgggggggagtgctgtggatgagcgggagaacaatgacacaccaactcctgcactggctgtttccagaaatacgagttggacagccgccctgagccacccactgtgccctgccccacccccgcaccttagctgcttcccgcgtcccatcctcatttaagtaccctgcaccaaaaagtaaatcaatattaagtttaaagaaaaaaaaacccacgtagtcttagtgctgtttacccacttccttcgaaaaggcgtgtggtgtgacctgttgctgcgagaggggatacaaaggtttctcagtggctggcaggctggctctgggagcctcctccccctcctcgcctgccccctcctcccccggcctcccccgcgcggccggcggcgcgggaggccccgccccctttcatgcaaaacccggcagcgaggctgggctcgagtggaggagccgccgcgcgctgattggtcgctagaaacccatttattccctgacagcccccgtcacatggatggttgtctattaacttgttcaaaaaagtatcaggagttgtcaaggcagagaagagagtgtttgcaaaagggggaaagtagtttgctgcctctttaagactaggactgagagaaagaagaggagagagaaagaaagggagagaagtttgagccccaggcttaagcctttccaaaaaataataataacaatcatcggcggcggcaggatcggccagaggaggagggaagcgctttttttgatcctgattccagtttgcctctctctttttttcccccaaattattcttcgcctgattttcctcgcggagccctgcgctcccgacacccccgcccgcctcccctcctcctctccccccgcccgcgggccccccaaagtcccggccgggccgagggtcggcggccgccggcgggccgggcccgcgcacagcgcccgcatgtacaacatgatggagacggagctgaagccgccgggcccgcagcaaacttcggggggcggcggcggcaactccaccgcggcggcggccggcggcaaccagaaaaacagcccggaccgcgtcaagcggcccatgaatgccttcatggtgtggtcccgcgggcagcggcgcaagatggcccaggagaaccccaagatgcacaactcggagatcagcaagcgcctgggcgccgagtggaaacttttgtcggagacggagaagcggccgttcatcgacgaggctaagcggctgcgagcgctgcacatgaaggagcacccggattataaataccggccccggcggaaaaccaagacgctcatgaagaaggataagtacacgctgcccggcgggctgctggcccccggcggcaatagcatggcgagcggggtcggggtgggcgccggcctgggcgcgggcgtgaaccagcgcatggacagttacgcgcacatgaacggctggagcaacggcagctacagcatgatgcaggaccagctgggctacccgcagcacccgggcctcaatgcgcacggcgcagcgcagatgcagcccatgcaccgctacgacgtgagcgccctgcagtacaactccatgaccagctcgcagacctacatgaacggctcgcccacctacagcatgtcctactcgcagcagggcacccctggcatggctcttggctccatgggttcggtggtcaagtccgaggccagctccagcccccctgtggttacctcttcctcccactccagggcgccctgccaggccggggacctccgggacatgatcagcatgtatctccccggcgccgaggtgccggaacccgccgcccccagcagacttcacatgtcccagcactaccagagcggcccggtgcccggcacggccattaacggcacactgcccctctcacacatgtgagggccggacagcgaactggaggggggagaaattttcaaagaaaaacgagggaaatgggaggggtgcaaaagaggagagtaagaaacagcatggagaaaacccggtacgctcaaaaagaaaaaggaaaaaaaaaaatcccatcacccacagcaaatgacagctgcaaaagagaacaccaatcccatccacactcacgcaaaaaccgcgatgccgacaagaaaacttttatgagagagatcctggacttctttttgggggactatttttgtacagagaaaacctggggagggtggggagggcgggggaatggaccttgtatagatctggaggaaagaaagctacgaaaaactttttaaaagttctagtggtacggtaggagctttgcaggaagtttgcaaaagtctttaccaataatatttagagctagtctccaagcgacgaaaaaaatgttttaatatttgcaagcaacttttgtacagtatttatcgagataaacatggcaatcaaaatgtccattgtttataagctgagaatttgccaatatttttcaaggagaggcttcttgctgaattttgattctgcagctgaaatttaggacagttgcaaacgtgaaaagaagaaaattattcaaatttggacattttaattgtttaaaaattgtacaaaaggaaaaaattagaataagtactggcgaaccatctctgtggtcttgtttaaaaagggcaaaagttttagactgtactaaattttataacttactgttaaaagcaaaaatggccatgcaggttgacaccgttggtaatttataatagcttttgttcgatcccaactttccattttgttcagataaaaaaaaccatgaaattactgtgtttgaaatattttcttatggtttgtaatatttctgtaaatttattgtgatattttaaggttttcccccctttattttccgtagttgtattttaaaagattcggctctgtattatttgaatcagtctgccgagaatccatgtatatatttgaactaatatcatccttataacaggtacattttcaacttaagtttttactccattatgcacagtttgagataaataaatttttgaaatatggacactgaaattattcttgagtctttcatttatttggataacactgtgattatacataacttttcggggaattataatactgtgctcagccaagaaagcaaaataccaaaaaccttggtattactagtccagcatcatgtgctaatgttaactgcaaaaaagaaacggctggatgattaataagtactggaaaaattgaaatttctgtcatttctaaaatagaaactagagacatatattgtaaatccgccccctccttttctaagcagcatgaataagcatgatggggacctatacttaaaactgatttatgccacttgttgccagaaaggattcaattctgaaatttttcatgtagtttagcagatgggatattgagccaaatcagaaccaggttggctggttttgttttcattttcttcacagcacaatggccctttgaaacctggctatagagaaaaatgatgcttcttgtatcagaataattgcaaactagacatgcaaagtgttcatctgctgggtgggtgtttggattactctggccctgctattgtctgagaggaaacaagtggtttgctttctttgttccttgacttcataaactttctcctctacattttcctgttcggggagagggaaagaaaagaacatcttgcaaaactccccggcttatcataaacatagttttttttattatttattttcttttttcccctctctctccctctctccctgaattccatttcttaaattggcagcgcgggtccaagcctgtagccccaaatcggataatctctgcagctgataacaagcaaaagagaagccaggcaacagccatattaaagaagaaaacaatcaactctgaggtagatattttactttgtccggtctaatcacatttggagatgattatgcttttgatctgttaacaatgttttactact

SEQ ID NO: 410 - DNA, 8060 bp, Homo sapiens
tttagcacatctggcccccaccagcctccccttctccttccccagccctggcctctgacaccccttgcatgccagtcaggccaacacaactcaccaaaccaagaaagaagaagcgctgaggagagagggttgtagagaggggaagaatggggacggcccagaggtctgacctatttataccccagccaggccctgcccatagcaggggacaggggagagcggatactgccttcctgctgtgggctgatgcggtaagtgccacagcaccctccaccagcccagccgtggaaccaagcctcctgttcccaggtgggcacccgtgggtaacgggtaagccctagcggttactagcaggggactggatgagatgggcaccacccagtgtacatagctcagcctgagttttagagaggtggaggaaggggcagcctgtgcctggagcatgggggacagggagtagtcccatggggacctaggaaaggagatgcagggggtggtgggtgacaggtgggagattgccctggaaatgtggtgacacaaaagctaggggggagatgggaggatcgcctgaggccaggagttcaagaccagcctaggcaacatagagagacttctgtctctataaaaaggaaaaacaatttttttttttaattagctgggcagcatggctgtagcctgtagtcccagctagtcaggaagctgagacaggaggatcatttgagcccaggagttcgagactgcagttggctatgctcaagccactgctctccagcctgagcaacacagaggaccttgtctcttaaaaaaataaagattcagaaacaaaaactggggtggggatccccatgcccggtactgtctgccatgccaagtaaggctcagggtcggggcggggggatctggaggggaacaggctcacacccaaaggaggctctgggaccacctcaggaacgtcagtgggaaaggtcctgggtgaggtagtgatggagtggagtggcagtgaggcgtgggggctcacggatagatctcaggttcggagagggtatcaggaggggccatttaaagttgggatgagtgtcaggaatgaagaatccaggttggggtggagagttagaggtgaaatggcatgaaataggggagttataattcgggtcaacctctcagggtgggctacaaacccagtgagggttagaagtagggggttaaggccctcagggggctgcggcttcagggataggggctagctcaagttattcccttacccctccatacagagcaccccttcctggctgggagaaacacctcagacaccctaatcccattagtgctgctctctgggctcccacagcccgaggcagggaacaaacacccccactgcacccacggccccaccctcctccaaccatgagcactgagtcccaggggaaactcaggcagtcctctctcaaagatcccaaagaaagagagagaggaagggaggacaggggtccttgttttgtccccacgccctcctgctggaccctggaggccactgcatttctgcagggtctgcaacttccctcagggagcaccctgcccctgccctcagctgccttcccgcagtggaaaaggccagagaggagcaaagagctcaggagacgcgtcctcagagaagaaccaaacaaaaccaagctgatgccagttttttattaggagttaaataggccctttcccatcgtggtctcattggtgcacgctctgctgagcctcgagggcctcagagcagatcccgcctcctcccatccacaagggaggccacaggggtgcggcaggcaggctgggccccagagtggctctacccctcattcgctgggcatcctgaggaaggagccctcacatctctgggcctcctaggtaaaatgggttaactgatcgcagaagacctgggcaagtccagattgaaaggggtacaggagagagggtaggagggggtgtgggagacatgcccagcccccgacagccagcgcaccccctggagcagaggctactgggagcaggggggctctgaggggcagtccttgaagtactcgtggcagtagagacagaggcaggcaagtgagcgcacatactccacaaagtccacctcgcagtccttgttggtgtccagaacactcatgaatttgttgtagtcacattcccgaaactcagtctgtgcaagggaagggttgggagaggtaagggagtaggatgaggagggcagaacagcctcacacgccacctccctccttcctctcccaagtggacccaccccaccccaaactacacccttctgagggccgacttcaacctccctgctctgataatgcactcgttgcaatcccctcccaaatctgtcctctcagattattaatcgagcacctactatttgctactgagtgcctaccaagtgttaggcattcttcatggtgctctcactcagtcctctcaacagctctgcaaggcagcagggatgattgtcatcccattttacagatgaggaagctgaggtttctgctgtgtcagttctccccctcccactccctcctcacaatccagccccctcccttgctgtcctgtgctcatgcttgttgtccccaggtctctctttgcagagtctaggcagtgcctccccccggaggaggaggggacggacactctgactgctcaccggggtccaggtggccagctccttctgcagcagctccttgagctccgcctggcagagcttgtatttgtccccacagcgccctgcgtattcctggaaggtgcacacgatggcagctaccgcctgctccagaggcctggccatcctcactgtcacagaacaagggtgtggctcacagcagagttccaggccagccccccagctcacctctgccctctgtgtttctcagagactgttcccagacccatcttaacctccatcaggcttcaggccccgcagtctccccctcctctgagtagccctcccagaccacaccagcccctcctaatttatccccctgctgtcctgttgttatttccccatgtagaggtctcattgccccaacatcgctgtaaactcctcagagagacagcatcctaccccaccacccacacaccccaccgtggggctccttaagcactctcagattatctgccacctcttcttatccccaacacccagggatggctcggtcccagtctgccccagcccatgagatgccctagaagcctccctccctgcaggaacttgcacaaggagagcctggccctgtgcttctctgccctcagcccttggagaagctaggccttagcagggaggggcaggtctgagaggcgcccccacagcctcaccaccactgccctcaccctgcctcctgccctgaactcgaggaagctgcacccagaagaaaaacttgtgggatcctctctgcctgtcgccagctgtgcaaccttggtgagccatttgtctctctgggtctcaggggcggggcctgatctgtaagttggggttcatctcacctcgctggcccagtcaggaacctgaaccagatggtctcttgagagttgaccagttcgggtgtttaccaatctgagactggcctcccctgaggttaccctcccgacccctgggggttttgagcagggaggttctgtatagggatactctgttctattggaggggaagcccttcctggaattgctcacctccccccacttccactgtccccttccaccgcccttctgggatgatgcctccagcctgggaaaacccgaaggcagccaggaaggcaagagttttttccatgctagcccagtgactcactcctgattcccccacgggacaagagtcctgcagcacagggcggccagggccaagactctccctgaagatttgcccactgctgggccccctgctgggagcaaatggctggcatggttgtggctggcaggaaagtaggggaaggggagtggggagtgccaagcactgccaggatttaattcattgtaaacaccccaggattagagcaaggtgtccaggttcccaggagaggaaagggccatgatcctcagaaatgaggagactcagaggtgaagcaaggaggcaaggagcaggtgaggggcctgatcaaggggaagaccagagccttgagcccagtgctcccaccccaaggcagaccttagctctacacacctccctgcccaaacttccccaacagcccctcactgtgtaaggaaacctctgcgtccactatatctgacttccctccccgtgtcaggcccgcctgtggtcatctctctgcttccaatgccagaccctgggtcaggagtcaggctggctactgggggtccccaaactgccctgacactcaacccagggcaggacccaagcagctggcactcaccactggtgctggcgtttcagctgtaggagcttagagacagggcgtcactatttgtagcctcccaagaaaggaaggaagcaattatgggggacacaagtaggtcaacactgaggatgccctcagggatccctcagcagacccattacaggccccacctgcccacctatccacgcacacatcaaaggccagtctgggctcagacaccactcccctttcattccccatctgccctcccccagagttgggaacaggggacagtctcctgccaagtccttccagctcagttggaggagacagtctggcttatccatcacatcacagccccatctcttcactctgcagaggcccccagaataccaagtggggacacacttctgcctcgctcaggttgcacccctacaaatctctattccgggtagaacttggagagcacgtggctaagcctcccctttacagacgagaagtctgaacttgcctgaccagatcccagcttttggctgtgaactgcttgcttcccaggggggaaatcatcaggtgggatgtctttgaggcacaggaaggaggtgtgttcctcccaggggcacttccagagtctaagcttgagatttctggcccttccaccccaggtgatgggaatgaatttgggctagagtcacatgaaggctggccagtggctggagctccttaagggctgttttccttcttcccctgctctgctcagcaccaaaacaactttccttgaagtcttgtgggtggcaggatgggatttcctctggcttttagcttgagtgtgtagccttttggggtctcagcatcatgggagggtcatccatttgtgtcccctcttggggtgagaactgggcttccacttctgtcttcctcactccccaaaccatcaggatcaaagctcaggttcggcttggcttggccaatgacctcagggcacggggggccccagtacagattctgctttgacttagattttggcctactcatttcttactgccttgtggtctcttcaatgctttgaaaagatttaattctatgcagcatttgttgttgtttttaagctgaagtgggcacagaccaccatattaccagaaacagacatactttcatgtaacttctctattctctccctcacaccagagcctgagaaactcctccctgttttataggaagagaacccaaaacctagaagagcgtgagagggaaaagaggaaggagattgactcccaggccggcaaagaagccttcctgcccgtgcaggcagccagagcgccagtgacaccttcgacctcgccctcggcccccagcacccaagccttgcctgtgccgtcctctccttggagactcagccctgttgaggaggggagtgagcaatagaggagggaaggaaaagaggagctgtgattagccctgttttataatgggctacatagccctgttttatatgggctttttaatggaagtatggggagcagggggcagagaacaagagacagtcacgcagcagaagggggggccagagtgcaccagcaattaattcagctctaggtcgagcttaattattcccacctatgatatcccagctctgcccccagccacctcccttaagcagcctacctctgctctcggggcttcattttactcacctgtcagtgatggagggtgataatagtaactacctcataggtttgtgcggggtttaaataagctaatacatataaagttcatagagtaaatagtgcccagcacatggcaagggcttgataaatgttaatcaagagatgggtgaggccgggcgcagtggctcacgcctataataccagcaatttgggaggccaaggcgagcagatcacctgaggtcaggagttcgagaccagcctggcaacatggtgaaaccccatctctactaaaaatacaaaaattagctgggcatattggcacgtacctgtaatcccagctactcgggaggctgaggcaggagaatcgcttgaacccaggagacgaaggttgcagtgagctgagatcgtgccactgcactccagcctgggcaacagagcaagacactgtctcaaaaaaaaaaaaagagagagagagatgggtaacttgcccagggtcacgtaatagtgagtggcaggcctagcaggcattcatttttcgtataaatatttagacgcattgggggtatagccataaacaaaacaaaagtccctgctctgtggagatgacagtctcttggggaaaacagacaataacaaaataggtgcttaacagattgctgatataaatgctatgaagaaaaataaagcagagctgggagaaagaagatgatcgtagggagcgacgtactttattaatatatgggtggtcagggaagagcccagcagcccggctccttgcccttgtcctcatccgccagcccctggcgtttctcagcttggcagacctctctgggttgcagcaccttggtttgtccactgggagaggactgggagagactcagactgagactgcggggagggcgggagctcattctgggaggtgaggcctgaggggtggggtggggggacagagttgtcaaggtacaggactttggggttggcagactgtcatggaaagaacctctaggctctaccttcctcttgccacctgccctcaagcatgttacattctttaccttgttagagccttaatttccttacctccaaaatgggtttggaagattcctactttaagaatccgacatgaaagcgctttctatcactcgctgtcactgtggacaatgtcagggcagaggcctctgagtccaattcaacaaacatgcactgagtcacctcagtggggcttcagggagggcgggaggggagggaaagaaccagcctctccccaacagttcacttggtcctgcctcctccatgcaggtggaggggagagctgtaacttcccttcccttgctttcacaaactcttcttgggatgattggactctctgccctgctggaagttcttccccagcatctcccctgaatctccctttctgcagtggttccgaatgcatcccacatgaaccgcccctccaaggcctggagagggaccgtcctcctcccacaccccgtccagtgtccacacactcaattgttcatgctcgggctgagcccaggacccttgctgctcaccttccagagccgcctcccccgcccccactgcagatgtggagctgaccactgagaaatgcaccatatttggagggcaaggagctctctccccgtaggggcaacgcgtgtgggtgcatgaagggtgagagctgacactatctgatctggcaggacttattatagcactgactctctctcccctgcacccattctccctggctctgtcgccccaatatcaccactatcaccatacgcccttggaaactgcaccgcctccctgaaggtcagtgtctggttctgaacctcggggaagaacaagataaattgtcctgagcatctggatatcccacatgcttgtgccaaaagggcctgggccccagagacagggtgaacccaccccaatcccatagccccatgggaccaacgaaccttgtcaaaatgattagcttcctttctcatcatctgagccaaatatagggaaggtgtaggaaggg

SEQ ID NO: 411 - DNA, 8060 bp, Homo sapiens
ttgctggtcttgtctggggtatctcagaagcagggaaggtctgattcccgagaagcgttactcttaacaatgtctcacagcttgtcacagtacataaaattcctcccttatagattaatacctttaggcattgagtccaatctttaagagttccctggtagaccaaatgcccacaagaggagtgccttctctgggggatctcttgccaaggtcagagcctgagccgagtggggatcttgaggaggggtcagtgcaggaggtcctgctgtctcctcaggggtccgatctgtccttgatgcatttttcatttcatcatcattcatgatgctctcttccaaacaaaaatcttcagtgacaataaagacaaagctcctcttttgcgatgatggcttgaaatcaaaagacatcttcctggcatgcaaccttaaggtcataagtctctttctcagactgggggcctgctggtgtattctgggagtcctgagaatgggcccccttgactcgagtctgggagccctgaacctggggtgaaggttgtcagaagcagatagggaaagagcgtgagtgtggagtcagacaagggggctagatcttggctctgctacttttaagctatgtaaacactgtgggcagatttcttaatctctggggattcttcatctgcagaatgggggtgctaacacagactttgtaggttcgttactgacagtgaaaggagtcaaggagtccaggcaccggcagagcacctggcacacagaaggtgccctgggacttcccacgtgtgtccccatgcatgggtcaccagggcaccaacatgtgatcttggcagggcagagcctagggcatctggagcctcaggctggtcacccccaatgaccctacagacatcctcatttcccacagtgtgggaaacaccaggaactgctgaggtcctccttaaggggcccttattgtggcccaggcctgctgtaccctggcccagctgacctctcctggttacgggggtgttgaccttgcactgctcagagcgagaagcctgccagcccctcagctcactcagcagagcacctagaaaattagatcccacttgtgagaggcaaccacgtttctcttcctccttccacgtgaaaacttcacccagaactgttttcttgcttgtttgtttttttgtttgttttttgagacagagtcttggtctgtcgcccaggctagagtgcagtggcgcaatctcggctcactgcaacctccacctcccagattcaagggattctcctgcctcagcctcctgagtagctgggattacaggtgtgcgccaccatgcccggctaatttttttttatttttagtagagacagggtttcaccgtgttggtcaggctggtctcaaactcctgaccttgttatctgcctgcctcagtctcccaaagtcttgggattacaggtgtgagccaccgtgcccagcctacacccagaactatttaacaagatttttcaaaatatactgacacgaacaaagtttgttactttttgttgttgttgttgttgttgtttaggcagggtctggctctgttgcccaggctggaatgcagtggcgcaatcatggctcagaccagccttgacctcctgggtttaagcgatcctcccacctcaacctcttgagtagctgggacgacaggtgtgcatcagcatgcttggctagtttttaaactgttttgtagagaaaagagtctctctatgttgcccaggctggtctcaaacccctgggctcaagtgatcctccaccttggcctcccaaagtgctgggattacacatgtgagccacttcacccaacaaaaatgttactttttaagaaggattcaactacataattttaagagaagacatgtatttatggttctaaaagtaatgtttgtcaaaaatgttttaaataaaattaaaaagaaaaacaaacattttcatgaacagtaatgtttgtgaaaattcaaaggtacagaagagagtaagtagtcaaagttctttttcctcctctctcatttctcacacgtgggctcagtggggtgtccccctcctcagccaccaaactggcagggaggtttggcatcagtttggcctggggagtcctcaggatgacccacaagtccacacaaatgaaggcttgcttttctaaccggcagagttggtgaggagagagccgaacgccaggctttccagcttacccaaagtagaagcagcttgtgcccttggaagggaagaagccagcctcgtcacccaactccatccagtgccatgatccctaaagggccctgcacaaacgctcctgggtcctatcactgacaaaaacctctcacacaggaagggtctaatcatacaccttctttcattcaaatgcctctttgttggggttctggggagagggggcattcaggctgcagggagggatggtctctctctgggtctctctctgagggtctcagcctcctgcccccacaaagaccccccaggtttggagggcccaagcagagccgaccacatacacagccctcctggtcctgggagaggtgcattctggaaggcaggaaggagtctgtttctaaatccctttctcagtgccatcctccatcaaggtggtctccagatctgacacgtgttctgccttcccataaaatcaggctcaggagatggtgcttcttggttctggatatacccctccctgccatctacctgcctggtagcctctgtgcctcccgcctccaagcctgccctgacttactggcaaaagagggtgtcctcgtccaagagggcctcatgggcacacgggctgttctcatcctcgtctccagtgaccaccatcatgagacccagtaacagtgctgctgtgaccagcctcattgtccaacccatgggcacctggaacagaaagaactttagagcggctggatcccctgcaggggccttcctgcccactacctgtgcccccgaccccaggggcccacttggcaggatagagacctctggttaagcacagggagaaggacaggcagcttccagggctccgcagctaatccagtccaccacccggacacaagtactttgggaggactgggcctcttccaagttggactcaatgtacgttcctggcagaggcccctcccctggcaggacacagctttgttgtcactcttgtcctggctgccagggcagagagcaggctgcaaagtagaagtgcttatataagctcctcggtgcagctccttgtccagtccctgctgttggcccagggatggtcagctggccaaaggccagcctgctccttggctgtaaggcaagccctgggaagctggtgaccccaggctcagggctaggagttgggctgtgcccctcagaccggctctgactctcctggcccccattcttccaccacctgtctccacagcctgtgagcttccccaaggtggaggtggttggacacagtgaccttgtgtaggagggactgctgcagggggtgggggtaggtgcaccccagaccgaggccagctccgaagggccagctccgaagggccagctgaggacagaagggtgcgtctgggtgcaccttgcagctgtgctgcactcagcactctcccaaaataatcgtatctggagaaggaggtctggggagctgcttggggctcagaaaggggtggcctgccccagcagtgcactgggaggaaggggagccggggactgtcgcctgcattcccttggggaacagtcctgccaccaggtgcatgtgggactctggtttgagcctgagtgggcagggagaagaataaaggcggcttgcaacaggctttccaatagctctgctctctgcttctcagaggcgggggtgggagagacgtgccagcaactcaggactcctggcttctgctctgagctctctctggatgctgggaggccactgtgtctccctagaatgcaccacttttccttttcacaaacaagtaaaataattcctgtcaccgtggtgccttgctaaggaatatgagatcatcgctgtaaagtacacgcagctagacctttagagaaactactttcagcatagtctgctttctggctcaattcctgcctccaggatcccaacctgtagcaaaaagccccccttaggggctacatattaaacacatttctcaatcattaggttctctgaagtacaaccaggactcccccttgccccaaccagaaaacatattcccaagatctcccctagtggacagagtctaatagtagcctcctcacaagatcattatgagaatgaaatcaaccaggttaagccctcagtaaggtgcctggcacatagtaaatgctcaataatttatgaatagtctaagtattctctcacggatccatccattcattcattcctttgcaacccacttcactcataggcattaagcacctcccacgtgcctgccccatgttgggccctggggtataggttgagcatgcagctcacaggacagccacagccaaggagatgctgccagaagggctgcccaagaccaagaaactcatcttccaaatggcatccactagagaagtctcaacttttctgggtgtcaactcctttagcacagtgatggcggcctggaagaagggagagcccacagtgcaggttgctgctgttgagcccacttccagtggcggttcttccttactccacgtgccaggcacttttatctccgaatcctcatgccaatccttggaaataggcactattatcaccccatcttatggaggaggagacagcacagtgacattagttaaaacctgatcttggtcaccaagaagtggcagacctggaatttgaaccccaggctctggttgaacctgtggaaactgggttgagtccattgagtccatgctttgttttgagacagggtctcactctcatcgcccaggctggagtgcaatggggtgatgctggctcctgcaacctccgccttctgggcttcaagggattctcctgccacagcctctcaagtagctgggagtacaggcacaccacggctctggctaatttttgtattttttgtagagacggggtcttgcattgttgcccaggctggtctcgaactcctgggctcaagtaatccacctgtgtgctcccaaagtgctgggattacaggcgtgagccaccgcgcccagcccagagtccacgctcttaaccacctggctccactgcactctgtagctgctccattgcctctcactcactccctctacattccctttgctcttgggagaaggacccagagtccttcacgtggaccacaataccctgcgagatcaggcttttcctgtctctctagctgacttcctcttcctctcacatgttacctctggcgggttcctcaagctcctttctatgccagggctgtgataggcactgaccctgcttcccaccttcattaggggggtagctgaaatgtcgtttcctaagagaaacttgctctttcccctagggtccatcagattcctgttataaacaattagagcactttactgctttcttcattattctcatatagttgtaataaattattttatagttatttgcttagtgatagtatctcctcatccccccagcctataagcttctcggaggcagcacggagactgtccagcattctgagcatcttacatggagtatatagaagcttaataaaattcttgtttaagtgcatgacacacgccacttccgtttctgatcatcctcattttcacttaacaggtcttaactctgtacaaacatcagtaggaaactaatcactcaggttggcccttagccctggatgccttttgcttatttatctaaccttctctggcttgtttttgtgcagagagatctggcagaatgcagtggttctcgggatttttcaaacctgatctttctcttggggattttcaggactttgattcatacttgaaacctaagatctgaaagccgtgttcaagcttgcggagtgacaattctccctccccatcaccaccccggctcctggaaagtcccattgctagatttcttggtgcccacccttgaagtccccctctcttccttcagttacctgggctgggaccacctccagacaccaccattcaagccaaacctgtggcttcctgagacacattggtccctccagctactgggatctgttggaccactgctgctgaaactcttcactcccttcttatccctccaggcctcctgtgcctgacaccctccaatcactgcctaggcctcacttcatttctctacccagacacagactcttgttatttctctccctcctaaacctttccacataggccctctggaatctctgaactgtagtgaacaaattcccctgaattcttttcattgattcctaattaaaaattaattgagatataattcacacataaaattcacccttttaatatatataatccagtgagttttcgtatgttcacaagcttgtgcaaccatcactaccaaagtacagagcattttcatcaacctaaaagaagtcctgtacttattagcagtaacaccccattcctccctacccccagcccctgacaaccctaatctattttccgtctctatgaatttgcctattttggatgcctctaccaacattttcccctccctcttttccagcctcccttcccatgaccactttcttggacattttcatcactacaaattgctccatccctaaaatattaaattcaagcagttttttttgtttgtttttgtttttgtttttaggtggagtctcgctgtcaccggggctggaatgcagtggcatgatctcagctcactgctgcctccgcctcctaggttcaagtgattctcctgcctcagccttccaagtagctgggattacaggcacgcaccactatgcccagctaatttcaagcagctcttctgatcaccatctcttctccttcctctaccctcttgttacttctctgcacttagtctttcatttgattctaaactctggtccctcgaccactctcctttttccttacctattctgactaccttccctctggtacctgggtcttacaaacctttgtactattcacttgctaacatcttcaatttcttcgcccttatcttcgcattgcagctgttggatgcaacttcaaatttggaacagtccagtaatctggctactccgtcatgcaatcctgctcccactctactctcagtatcctgtgccttctacagagcccagggtggggcccaggagccatgggggaaaacactgtgctaagtgaaagcagccagtcgcaaaagaggacatattgtatgattccatttatatgaaatgtccagaataggcaaatacacagggacagaaagtagactagtggttgctaaggctggaggtggaggtgggataagacgtgaatgagaggtatggggatgatagctaaagggtatgaggtttcttttaaaggtgatgaaaatgttctgaaattgcctatgtgatggttgcacatatctatacatatactaaaaaccactgaattatacacttcaaaatttatgaattgtgagataagtggagcatatagcaataaagctgtttaaaaaaagtcatcctggggatgtcagcaaaatggatgattaggaagctccaagctcttgttccctcatggaaagctaaacacacatatacacacacacacacacccccagagagacagagaattggatgaactaactttatagaagctctggaaaacagccaaaggttagagcagccaagtaaatgcctaatcaaggaaagcctccttaactgcaccctgggtgagagaaggagaccctgtctcaaaaaatttttaaaagcctccttcaaaataataggaatttttccagacacggtggctcatgcctgtaatcccagtactttgggaagctgagatgggcagatcatctgaggtcaggagttcaagaccagcctgtccaacatggtgaaaccccatctctactaaaaatacaaaaattagccaggcatggtgac

SEQ ID NO: 412 - DNA, 8060 bp, Homo sapiens
cgcctgtaatcccagctacttgggaagctgaggcaggtgaatcgcttgaacctaggaggcagaggttgcagtgagccgagatcatgccactgcactccaccctaggtgacagagtgagactccgtctcaacaaaaagaaaaaaaatcacatttgatttaagaaatcattcgatgttgccaggcacggtggctcatgtctttaatcccagcactttgggaagctgaggtgggtggatcacttgaggccaggagtttgagaccagcctgggcaacatgatgaaatcttgtctctactgaaaatacaaaaattagccaggtttggtggcacacacctgtaagcccagctactcaggaggctgacacaggagaattgcttgaatctgggaggtggaggttgcagtgagctaagacggtgccactgcactccagcctgagctacagaaagaaactctgtctcaaaaaaaaaaaaaaaaaaaaaaagaaaaagaaaaaaagaagaagaagaaaggaaaatcattcaatgtgaaatcttgccatgcctttctttttcttgagacaggatctcgctctgccctcaagaggcttgcaatctagcccacggaacgatgctcttattaattatgacttttggggagtgggacagcaactccctggacctagcctcagggagggagatttaaaatggcccatggaccccagggcaaggaagcagccaggtcatgggcaccgcagtcaggattgggcacgtgggactgactcccattctgagcattggtgccctttgctccagtgcaggaggtgagctctggggagggctgctggggtcaagcagctgctggcaggtaacttgggggcagtgagtgcttggaagcacttttgctggtatgtttcttcattgtgccagactctcttacgccctctagtacattcagcatccttgggcttggccactgaatgtgggcagcagtcccatcattgtgacatcaaaaatgctcctgcacatttgcaaacaccctggtattccttggcccatggcagcagctgaataaactgggatttgggtgagggaagggagttaagtaaccaaccagcatggctgaagccatgtggggcggagaggagaatttccttgaagaagggcacagtgtcggcccctggttgtgtcccctgctcacacagatcggacgtaggaccgcttatccctcggcatccatcttcctgcgttcttcatgagcatttcttgatacgaattgcatgcggatctgtccctcagtgattggcagatcttaggtatcagtcaatacctgttaaatgaatgaaaggatggtttgcgcacttgcgtgtttgacacggcaccagctcagtcagcgtcttttgtctcactttttttggcccctgtttgtaatcgattttcactccctatgtttcatttggatcataatatagttgtgtgtgtgtgtgtgtttttttgatggagtcttgctctgttgcccaggctggagtgcagtggtgcgatctcagctcactgcaagctctgcttcccgggttcacgccattctcctgcctcagcctcacgagtagctgggactacaggcgcccaccaccacgcctggctaattttttgtatttttagtagagaaggggtttcaccgtgttagccgggatggtctcgatctcctgacctagtgatctgcctacctcagcctcccaaagtgctgggattacaggagtgagccaccgcacctggcccataatatagagttttatctttaaaatcatcctttggggtacagattgccccccaccacatcgcatgtgttcctcctggcctgcatggtgtcagaacaagatggtgaaatggcaaaccttgcttccgcagctaccaccaagtgccttttaccagtcagtggtaaaatggggaattatagttgttgccattatgtcattgaggacatgttaaacatatgccttaattattgctttagctttgttttccagtgagaagtgatgatcacttatacaagtgttttatttttttgttgtttttgttcttgttgttgagatggagtcttgctctgtcactcaggctggagtgcaatggcacaatctcggctcactgcaacctctgcctcctgggttcaagtgattcttctgcctcagcctcctgagtagctgggattacaggtgtgcaccaccatgcccagctaatttttgtatttttagtagaaacggggtttcaccatgttggtcaggctggtcttgagctcctgacctcgtgatccacccacctcggcctcccaaagtgttgggattataggcgtgagccaccgtgcccggcctacaagttttgttttttaagagataggatcttgctctgttgctcgggctggagtacagtggcctgatcatagctcactgcagcctcaagctcctgggctcaagtgatcctcctgcctcagcctcctaagtacctggggctacaggtgcatgccaccatgccctgctaattatttttatttttatttattcattttgagatgtagtctccctctgtcacccaggctgcagtgcagtagggcaatctcagctcactgcaacttctgcctcccggcttcaagcaattctcatgtctcagcctcctgagtagctgggattataagcatgcaccaccatctctggctaatttgtgtaattttagtaaagatggggtttcaccatgttggccaggctggtctcaaactccaaacctcaggtgatctgcccacctcagcctcccaaagtgttgggattataggtgtgaaccaccatgcccggcctattttaatttttttagacacagtgtcttgctgtgttgaccaggctggtctcaaactcctggcttcaagcagtcctcccacctcagccttcctgagtagctgggattataggcatgagccactgagcccatcaagtgtttggtttttggtaaggaagcttagaacctattgccaaggttgggtatggaataaaaagcagtgaagctcttagtcctcagtgcctggcacacaggcccttggtcggcacttagtatttgtttttgttgtgtttttttttaagatgcagtctcgctctgtcgcctagacgggagtgcagtggtgcaatcttgactcactgcagcccaggttcaagcaattctcctgcctcatcctcctcagtagctggaattacatatacctgccaccatgcctggctaatttttgtgttttcagtagagacagggtttcgccatgctggccaggcaggtctcgaactcctgaccttaagtgatctgcccaccttagcctcccaaagtgctgggattacaggcgtgaaccaccacgcccagccaggcgcttagtattttgagtgagtgagtgagtgagtgagtgagtgagtgaactgatgaggagagcactagtagactcatggacacctgtagcacattagaaagtggcagaggagggaagcttctttcttggagggcttttcaaggttgtctcttcaaaggggcaagtgcggatggcatagcccccatgtggtctctcccttgctagccctggggagttcttgctttctgttttccatgtgtgtagcttagagagcccttttgttgcctaagcagatgttttctctctgggtactagttgtttattttgaaaagtgtatatacttgattatttctgaaggataatactctggctgccctcctttgatttggttttgcttgcccttgagatgaacagccgtggtgtaagtgggttgtgtacctcccctattctgctagccttattttcagtgttatacatggatgtgttaaagtactgagcatttatttttccatcttgagctgtccttgacttggagagggctctgttgaagtttacatgtcagtgtggttggtgtgcagtagactccagccaactcagagtgagaggaattaacagcaggtgggggttgggggggtactccacagatcgcctcggggtgtctacataaatgccctgtaaatgtgaatgaacagcctgtgggtggtgagagcagttttctaaggacagtccaaagccatcttcagatcttcaaggagatccatgattcgtgaaggattcactcctctggatcagaggttctgctgtagtgacactcttttttttttttctctctctttttttttttttcttctctatttcaaaggcagatcgggagcggtgccgagaaaaatttccttactagatgacatttcatcgcaatgtccgatcgtttggggcaaattaccaagggcaaggatgggaaaagcaagtactcgactctcagcctgtttgataagtataaaggaaaatcagtagacgcgattagatcctcaggtaaggcccagggttgaaggccagttcctcaaactttctccgagtgacatatcccagaaacccagagtccctcacctggttagacagatgtggtccgtgcacaccaggcttctgggtgtgcatgtagaatcactctctacttcctacttgaggtatgatttcagagccttgagcatcctgactctttctgtagtggaattttctccatctattaccttattgaagctggggagatatatctatagatatctatagatagatagatagatatctatctatagatatctataggtgtgtgtgtatgtgtgtgtgtgtgtgtgtgtgtgtgtgtgtgtgtatatatatgttttggagacagagtctcactctgtcacccaggctggagttcagtggcatgatctcagctcattgcaacctccaccttctgggctcaagcgagtctcttgcctcagcctcccgagtagcaaggattacagatgtgtgccaccacgcccagctaatttttgtatttttagtagagatggggtttccccatgttagtgaggctggtctcaaactcgtgacctcaggtgatccacccgcctcggcctcccaaagtgctgggattacaggtgtgagccactgtgcctggccaaagctgtggatttttatcctgatgggtagaatgggacttaataggcattagtgttatcctttttttttttttttgagacacagtttcgctcttattgcccatgctggagtgcaatggcgtgatctcagctcagtgcaaccttcacctcctaggttcaagtgattctcctgcctcagcctcctgagtagctgggattacaggcatgtgccaccacgcccggctaattttgctttttgttttttgtttttcttttttgagacggagtctcactctgtcatgcagggtggagtgcagtggtgtgatcttggctcactgtaagctctgcctcccgggttcacgccattctcctgcctcagcctcccaagtagctgggacgacaggcgcccaccatcatgcctggctaattttttgtatttttagtagagacggggtttcaccgtgttagccagatcggtcttgatctcctgacctcgtgatcggcttgcctcggcctcccaaagtgctgggattacaggcgtgagccaccgtgcccagcctaattttgtatttttaatagagatggggtttctccatgttggtcaggctggtctcgaactcccgaccttaggtgatccacccacctcggcctcccagggtgctgggattacaggcatgagccactgcgcctggccagtgttatccttaataaagaatttttttttttttttgagacggagtctcactctgttgctcaggctggatggagtgcagtggcgcaatctcggctcactgcaagctccacctcctgggttcacgccattcttccgcctcagcctcctgagtggctgggactacaggcgcccgccatcactcccggctaattttttgtatttttagtagagacagggtttcaccgtgttagcgaggatggtctcgatctcctgacctcgtgatccgcccgcctcggcctcccaaagtgctgagattacaggcatgagccaccgcgcccggccatccttaaagaattttttaaattttgttttaaaatttatttatttatttagagactgggttatgagactggctaatttttgtatttttagtagagacagggttttgtcacattgcccaggctggtctcgaactcctgggctcaagcgatctacccacctcggcctcccaaagtgctgcaattacacgtgtgagccaccacgcctggtgtgttatcagcctttttagctttcatggttcttgatattctagaacttgttggaaaggttcttgttgatccttttcacaccccatgaagacttcatgaatgtcgaagggctcctgttcagtcttgttttggatctaggcagaggctgtccctttagtcctgtaatgagaccagagctgtctcaacttgcagagaggtggttcctctgtaagctggaggttcctgggcctgtctcctcacccatgttgtaaagtctgcgagccttgtcctgcccatcagtgaaatggaagcctttttacaggttttagcagctcctttgtccctgtagtcttcagtgaagagcttgtaaagtgactaaagtgacaccaaacacttgtttgtcccactgctggtctgccctttgttttttgttgggttagctttgttatgatcacttagagattgaaagaacagctgaatgcatcaggcttctttccttctgtgacctttttgcatggtgtctgttccatgtccctctccctgcagttattcctagacatggcttacagagtcttgggaaagttgctgcagcccggcgcatgccaccgcctgcaaacctgccaagcttgaagtctgaaaacaaaggaaacgaccccaacatcgtgatagtacccaaggacgggacgggatgggcaaacaagcaggatcagcaagacccaaagaggtaaacggaggaggcgggtggtgagtgggagctggcgctccaagggtggtcccggcatccttccctgtggcaaactaaccctaaccctttggctactgcagcgctagtcttgcagtggcagaattggaacactgggagatgcaaatgaagctgcttcctctctggccctggtgcttcgtatgtttctttttccctgccttcattttttctggcttttagagccgatggagcagcacatctgtggacaaccttgtccccagtgaccactttccccctgtgccttattaggaaaggcctcatcaccccagaggagcttatgcaatgactcagagccaattcctgtaagaaacactgtggacagagctggggcttgaggacttcattcctggtgatgggtgtccctgtgagctgagctctgcagagaatcatgcagcttccctaaccatcggcccagcagcttcccagacagaggagacttctgctgttgctctaaacagacctagtcatcagtgagaacagcacagaatcctccaggatcactgtactgcagcctccctggaggctcacctcctgccagcacagtacttacagaaaccctagggggcagagggtggcatggtgctgtcaatcagagaaacagcccctgtgtggtgggctgaaaacacagggcctggctgcctggggcccacttggatggctgcacctttgtctcctgctgcaagtcctctctgagtgtttagccagtgctaagacaattcagggaaggggatgtgttcagggagggacagggccttgctgaggctggcaggcagaaatctgctgctggggtttgcctgttaaggaatgtgaacaaagctgtctggcggcagcgccctcctggcctgcatctctggtggcctccctgctgatgtaggaaaccagacggtaaaagggacccagatctcagcctgctgaccccagcatccttttcttacaagtctgtgctagaaatgaccatggtagcttttgtaaaattgttgcctgtatttacttcagacaggatgtagagagtgagctagtttagttattcagctagatgattataaagtagtaatcaaaatagggccttagaagttatttttaaaacatttctaagagtttgcttag

SEQ ID NO: 413 - DNA, 8060 bp, Homo sapiens
ccctcctcagggaagaaagtggatatacgtgattggcagggttgattgttgctgctgctggcaggctccagagaagtcaaatagctgcctgtagctgacccattgcacatgcatcttcaaactctggtggtcattgttctacacctctggccagagttagtgggaccaacactgtggaaatatgggcagtaggaagtgctccaggtggaatttccagacttaggtgtagtcctggctctactattaactgtcaggatgtgcattcctcactgggtctcactcttctcatctgtaaaatggccacagcagtcttatttcctgacccagagtatttctgtgaagactgatttcttcaacctgcaacagaggtgtctgcaaaaaaaaactggatcacaaggtcaggagatcaagaccatcctggccaacatggtaaaaccctgtctctactaaaaatacaaaaattagctgggcatggtggcacacacccgtaatcccagctactcaggaggctgaggcaggagaatcgcttgaaccagggagtcggagtttgcagtgagccaagatcacaccactgcactccagcctggtgacagagtgagactctgtctcaaaaaacaaacaaacaaacaaaaacaccaaagcaaaatgaaacaaaaataaaactacagcaagcattataactaatggtgaactattgatatctttccttctgagatcaggaaatcaggaatggggcaagagtgtctgctactattacttctttccaaaattatactggtgatattagccagtgcaacaaggcaagaaaaagaaacaaaacttataagaattgaaaagaaaaaactaaaactctcatttttacagatgagatagaaatttttttttaaagccaaagaatctacagatgaattactagaattaataaatgagtttggcaatgttgctggatacaagggcattatttaaaaatctatttatactatgtttcagacctatattgctaagtaacaaatcactccaaaactttgtggcttaaaataacaataatcatttattatctctcatggtttctgtgcattttggattcaagaagggctcatctgcacagttcagcctttttcatgtgggtacagtcagatagcagatggaacaggaacagcaggagctggcagagctggggactggctaggaatccctctttacttagtatcagggtctctgcatatgatttttctgtgtgggttagtttgggcttcttcaatgcatggcagcctaagagagagttctcatatgatggcttagtgttccaaagacaaaagtcctgagagagggagccaggtagaagccctattaattttatgatctagctagcctcagaagtcacatagattcacttctgtcacattctttttgttaaaacccattcgctaagactaatcccttcccgaggggaagagtgttagactctacttcttgggaaaggtgtcaaagaatttgtggacatgttgtaaaacaacaaccctgtactgacaacaaacagaaaataaaataaagaagccattcataatagcaacaaaaaacacccggggctaaatttaataaaagatgtgcaaggtctccacgtagaaaactacaaaacattgctgagataacttttttaaaaacccaaaataaatgaagggacataccatgttcatggataagaagttttactattgaaaatgttaattttattccaattgatctaaaggttcaaagtgataccaattgaaatcccagcaagattgtgttagtgtgtttgtgtgtatatatataaataggtatgctgattccaaaatttctgtgaaagtgtaaacatcaagaatagccaatgcagtcttaaaagaacaaaatgggtaggcttatttcatgggacatttagacttataagcccacagtaatccagacattgtgataatggcacagggagagaaaaataggctaacagaacagaatagagaattcaggaacagtcttatgcacatatcgactacttgatttacgacaatgttagcattgcagaagagtatgtgtgtgtgtgtaggggggtggtggtggtggtggtgatcttttcaataaagagtgctggtcagttggatatccagatgaaaaaaatggacacaggacaatggaaatttttttctgatgaggtgtggcattgtatttctagaaacaatgactgctgaaatttatttggaagttctttcctttctgagctataatttccctctgttgttcccaagccttcagtgaatgcctgtttcccacacctatcttttgttaatgcatctttcttatggtcctagttctaggccaggaccagcaaagcccaagcagcagttgagaactaagttctaagctagctcctgagtgggcaggaagctcaagtccttttctcccaatggcatcctatatcctggtgccacacaagaatgccattctggctgacttcgcctcctggcctctcccagtcagacatacctggagcagtcagtgagcagtgagattgctaggggagattgctagtgtagacaattcttgcatgaaaagggggatgggggtgcaacagtctagcaaccagcaagtgatatcaagaactagagggttttttttttttttttggttggggaggaaccccatttcacagtcacctttctgacccaccatcagagccatcccattccaatctcattttcttcctttcctcactccaagagaccgtgactgtgggcagatcctagacccctcttcagagcttcgggctctaggcattcctgcggccctcccctccctatcattaaaaggggtggggtcctgctgccttctccaagtggtttcagctctggatcctttgggggcaacggagcccacccgcctggagctccattactgatgctgcaagtttttgactcagtttccccatatgtgagtgagagtttaagcgcggcaatctccagggggggctgtcaagctgactcagatcagtgagacgaggagggggcgggcatgctaagagcatcctccggcgctggcctgcgtccccccaggtaaggcagcacccatctccaaagtggtcctgtcaccaccttcctcttccccccgcacccacgccgcggggcggggactagcgccgcctcaaatatttagggcaagggagtgtcccacttctggggaggggtgccgttcgggcttctctcctcaccgtgggtggcgaaaggcgggacggaaaagcgccgtctggacaggcgcgcccccctcagggatgcagggccgggcgggggacccggcggcggcccagcccggaggaaggacctccacgccccggcccgggcccccgggcccccggccctaggcagcgcccgaggccggaacaatagcgcgcgcgggcggggcgggggcgggggcggggcgctcctctgggcaccgcccccggcccgccccccgcgctcgcagtcccgctcgcacactggctcccacccgccgcccgcccaggcactgcccgcgggagccgccgccgccgccgccgcgcccgccatggacgtccgcctgtacccctcggcgcccgcggtgggcgcgcggcccggggccgagccggccggcctggcgcacctggactattaccacggcggcaaggtaggcgggggcgggcgggggtccccggcgggcggggccggagtcacctggcagctcgggactcaggcgctcccggggtcacacggggccgcgcacatcagccccgccgacgggcacgggcggctcacatcgatcccctcgcggccacgctcacgccctgagttgttgggatcgcgggcagaagtcatcccgacagccacccgtgcgacgacacagtggcccctcactcgcgtccccctgacagcctcgcagtcattcacaagccgtcacagtgacccacagccacacgcaggcggccaggcactgcttacacggtcccgccgtcccacgcaagtcaccctgacagtcacttatacacaacgacacgcaaccactcacccgcaaacagcctcaccgccacagacgagtcacccacagacgctccgatgccccacacaccgtgacatgcccccacccgctgtcacacccaggcacaacgggggacagtcacacaaagaagtcgcccgacagtcacactctcgcagccacaacgcctcacccaggcgcacgctgtcacacacagccacccccctggacggtgagcctcagacacagatcgtcctgacggccacacagtcacacgcggtcacacccagggacggccacacctcggtcatccacactcgcgcgtcgaggtttaacttctcagcgccgcagcacactaattgggcagtttactaattggccgtcactgcctggcggggcctcggattccgagtaggctgcggccaatcgaggcctgtgtcctcccgggagcggtgagccggcgtccctccaggctggggctgtagtgccggacaccctccctcctccatgtttccaggatctatccccccaccccagccaggtcccagctgcgctgcgccgggcgcattcccagtgatggaggcttgcgtgcctggaaccccgaacccgaggcgtcaggtcccactgccgggtctggcccagcctggatgggttgggtgcctctaagcagtccgcgtccccttcggtcgccggagagggaactttcaaacttagttaggaagccagactgtccgcgcgtccgccagtcggtgcgtcggtcccgggccggctggagccaagcgcgggttttcgtcactcggagcccggattgaacagcgcgcgtgggtttcccgcagccctggcgcagacgcgtgggctccgtggcgatgcggggtgagtgcgcgtccagtggctggatcggcgccccccagggtctctccccaacctcgcaggcttttcgtcaggcccctggtagtggggatgaggcaggagagaggcgtcccggcgcggatcccggggcctcccgggctgggcctccctgagtgcgccctcaggccccaggggagcggcttctggcaaagcctccctgcagttcgccaggggcagcaagcatccaggccactagggcctgcgcgatgtggggcggtggtgggcgacaagtgaggtctcgcgaagagtggcggtggttctcttttgtccagtgacctgcaaagttagaagccgatgaggggggatggtagcctcaggagaaggccgggagctgcctccagtctgatggaggaaaatagattaaaagtagcaagtggagttttcagggaggagaaggttgggtgtgggggcagctggtctgtcttctgcccttggctttgttatttttcaaaatgtgaagttggcgaggtaggtaccagcctctggtttgcgggtgtgggtgggctgggcatttgtgcctcaaagtctgagtgggtgggggtttagcctggagcgctccgtttgagggtggtgtttctataaatctcgccagggtggggctgtcccaaataggggcctttggaggcaggactcagccgaggcccctgctttattctgatgctctgtaaacctctgactcagcaccagaacctgtgcgaatctcgccgggaagggcccgtcagggagggaatgagaagccggcgattctggtttctttctgtgtgggatgtaggacccctggcccatagctgaggatgtgtccagagtggggcggggcagggatgggggtggggatgcagctgagccacttgataggtgaaaggaaggtctgactttgcacttggatgtgaaatctgctactcagtccttcaggctagagcagggtgaggcgggaggggagaggtcactgtattcatttaggggctagaggtcttttggtaagggattcccaagtgggcatggccttagtggtggtggttggggggtagggccaggctgtgatcaggaactccccttttctggctcaagaagtggatggggaggggttggggagggaaatgcccaagctccacctttacactagtcactatcaaagctggaggggaaacaggctcagggtgcagtagtgaccacacttggggcctgtaggcctggctgaatccagacattgtggggtggacacacccacacatggggggctctgtccgcagacaagaggctcgttgcacagggagccaggctttatatacataagggcaagcatttgcccaagtgatgcccgacacctatggggcagttgacctggaagggctcttggcgaccgtccccttggcgaccatccccttggcgactgtccccttagcgatcctctacacagagattcccagcctctttaaaccaaagtcacgaacattggttgttcttttggtatcttttgtttgagaaaatgcacactaatgaaaagctgttatggttttatttttgctttgaaatagatgtgtattttattaaacacaatattagcatgcattagaaaaatagcttaacaggtatgaagaagactcattactatttaatgtaataaaggtgctttttgagcatagggatttgtggccccatggctcccaggatctgtggctccatgctgggaaccattggtctcctccttctttgcattacagaaggggaaactgagtcacagaggagtgtaactcacagattacacagcaagtaaggaacaaagatgaggcctgagcccaggtttgactcccagcaggacacttgtttggcttttttgcaagtctctgtcatggttcaggggtttagagcctgtaacatctttcttagggtaactatgaactcctggttcagattttggcaaggcatcttaccaggctgggggacagctgggggatccctgctcaactatggcagactagtgtaaactagccatcagaactgggcaagcctgggttcaaatgtccatttgttgcttagtgacctagggcaaatgatttttagctcattttttactgagatgtgatttacatacaataacatgaagattttaagtgtacagttccatgagttttgataaatattaacactcatgtaaccagcatcccagtccagatagagaacatttccgtcatcccaggaagttccctcacatccctttatagacagcacgccttatccccacctccagaggcaactacttacctgatttctgttaccaatgctttctttaagttcaatttaggtatattaaccatgcttaagttctagaacttgatatgcagcataaacatttgtgtgtctgtcttctttttgctcaatgtaatgtcttcaacattcatccacgatgttgtatatatccatagtttgttccatttaattgctgagtaatattatattgtataaatataatacaattggtttatccattcacctgcaggtggacatttgggtttgtttccaagttggagctattataagtaaagctactgtgaacattcttatacaagtctttttgtgggcggggaaaatcatttaatatctctgagtcttggtgttctctcaaagacaacattgcctacctctgagtttcaggacggttaagtgaggtgatacaggttaggacagttattggcacataccagctactaattagataacaacaatatcaaccatctggggcccattccaggaagaggcttagcatctccgttccagcatccttcgtccctggactgaagggatgaaggccttcatcaaggccaacctgggtaccaccttccccatgtggtgcttcacagccagcaaacttctctttctttccaggcttccccaagaactgatactgcataggatgtggcatgttctgccatccatcattctaccaaaaatatttattgagcacttcttggtgctaggcactgtgcacagcaactgatgctgcagcagtgaacaaaagtcactcaaatcactgccctctggagcttatttatcagtgtgggaagtcataaatatatgggtgaaatatatggtatcatgattgatgggaatatgacttttggagaaaaatggaacag

SEQ ID NO: 414 - DNA, 8060 bp, Homo sapiens
ctctgggtttcatttctacccttcccccacagcctcttcccagacaggagtgggagatgaatgaaggtccttacagttgagtcccacatcgtggtaggtaaggatcgctgggcgtttgggtttgggggtgccatagacagtgaaagtgacagagccgtatggtgtctccacagagtgagtctgcaggaaaacagggcaccaagagctaggctcagaggagacgaggccagaaaaggagcaacaccaaggtcagggagctgggagtgggtgggcaagagggaaaagggaacaaagaattaaaaacaggatcagcaagaattgaggaaaacatgataccggaagatgagtttgaggataagaaagaataatgaagattagagagagaagaggaggggaaggaaggagaggggagagatagggaagggaaaggactagaatagaaggaaagaaagcaaagagagaagagagggccaagcagaggccatccttctactggggaagaggacagcccctcctcccaccttgggactgcccccacactgttacctgtccctggtccaggaggattcgggcagctaactcagcctcctggagagacacacacggattcacacagaaacacatgaccatgtggcgtcccagatggagagacaaacagacaaagagaggcaagtaaagacagaccaacaaatgaccaaagacagaaagagattgacaaagagagacacggaaaggatgaaggttagtgtagtgacgagacaagggcctgactcccaattatagtgtatggggagagagactagggtagtggtgaagcagtggtgtgagttagaataagatcagtacgcttgggaagttagaaggcaagggggatgcttagaggtctggaatttgggcatgggagtcaaacggtctctaataaccttggccgcctcaggcgtctgtcctggcaacagtggcttctcctctgtgatctgcacctcctgcagctccgccatggtggcctggcaggatgaggaaatgagactgggaagttgtctctacatccccacatcgcctcaaacaccaggcttcctctctcagcacaggaagatgcagggaacagagggacccaggggttgaagactactctagaacacacagagggcctttcctgcccccagctccgtttccaggctgatcggtggaagctttggaagaggaatcaggacagcccttctcttgatactcaccatccccactgccaccctcaacaccacacctccagacccctccctcctctgccctggaccaaaataccagggtggggcagaagtgtagctcagatttctcgggctatatttaggggccaccccacactctcaggtagggagtgaaacttgtagctcagtgactgagtattctaaaggacagggtaccaaaagacgggactgtgagagttcacaattgaccatgaccttcaattaaagccccaaagtcggcagctcaaagggggctaaaaatgaccaaagcaacatgaccaatgggggaggtggggaaaacaacataaaagggacatctgtccaaccaacccaatgcctcccttcctcccaagacccttcctcccaactctgaataaactccgcaagttcaacattagtgggtgaggagcagagcacctggacagacctgcacaggaaggagcctgcagcctgcggggtggggtcacttactgggctcctattggctggatgcagtgggattaggggtcagggttctcactccttctgactctggggtctgagaaaacacagcaacgaggtgaatgacatgggagacagacctggggtctttcagggacggaaagcctcagccaagacccagactcccagggtcatcaacctcctcgggtcactaaccctccccagtgtctgtctacccctaagtccagagaacacgtcctctctaggctcgagccggaatcaatataggctacaagggcatcagttcaggctgcgcggaggagagaaggaagtgctgatgtggaggtaagagggtggccctgtcagaacctccggattcgaatcccggctctgccactcccagtgtgaccttgccccagttagttactacatttggcctcaattttctatctgcagggggactaaacgcgggggaataggggatccccaaaatttttgacagctctccagtaagaggagggtagcagagcatggctgtttccctccacaatttaaaaacaaacacaaagattggtgccgtcgcttctctcctctactcagtctccgtgtaggtcccacgagtggagaaagggagaggagagcggtcccacaatcttctcccgttctcccccgacggcccgcgaaggcaagcgccatcgggaagggatgggtaggacagaggagaccggccgggcccagcacccggaacccgtccctacgagtccctacgcagcccgtccgcgtggagactgacacccttgcgtggccggtgccaagcgccccggaccttgcacacaacctcgcgcgcaccccaaacacgccctgcagctcttggagcctcagcctttgtgcgcagcaaccgagcgcccgctccgtgctggccctttcccccgagcctccagctccaggggacgcggatcaatcacaccgcccgccggcccggctggcgccttccaggccctacggcccctcgcctgcccctccccctacctgctgccgccgcggccgcttccaccttcacttgcctttgactcgggcccgccccggctcgggcttcccgcagacccgcccccggcccgccccagcccgcccacgggcgctaggctccccgcagacccgccccagacccccagtaaacacgccccccctttcaccccgcccagactgccgctcaggaaagggttgtgctggggccggggggcgaggggcgggcggctggacgcttccaggctctgctcggctcaccaaaacattccaccaccccctccccgcattggggcggtgtggggagtgcggggatccctcagccctgagagggatccctcggctgccctcagcaccgccccatccacgacctggatctgcaattgcactctggctccttccttcgcccccagactcagtggtgggaaccggtagtggggagacgaacccgggatactgacaccccacgagttcgactccccccgcccgaacacagagaactagattaagaaaggaggaggtgggcgggaccgccgctgaggaggcgggggtctcgccggctggcaggggcaggtgtgctggcgccgaaagggggcacgggggaacgtcgagggcgcaggagttccgactccctcgtgcccagagtcctggtacctctcctctctttgctgcgtcccgacgcctgctctccggctgctccgggagaagttggacaacaaggcggggaggtgggggcggggaatgcggggggccgctataaatagagggcgatcgcgggcaggcggggggtggggagaggatggccaacagggactctggggtcaatgcctcaaggggcgcgggggaggggccggggacccccagaggctctgactcctgggtaaacaggcgcaggggcggagttaaccctgcgggggtggagtaggggcttggggaggacgcagtgtcctgggctgggacccaagagaccctgtggcttcgccgctaacccctcccagtccggcccagaataggagaccagctcaggcccgctgaatcgcaatgcccgggggatggtctcagggtctgccgcgtccctctcggtgcccgagtgggtttgccactgtagactttacacacacacgcacacgcacacacacacacacaccctggaatgagctctccttgtgcccctcggaggaaggctccctggaatgagttagttgattaaaaatgtggcttaagggaattcgaagttgtttaggcaaaaggaaacctgactgaatttctccccacctgccccccttgtagctcccccaatcccaggatcatatccaccccaacccccttcagactggttcctgagttgccatttcgggggctgggcgccaggccagtcaggaacaatggccaatggaacttgagctgccaactgcaacaccagcaccgactgcccccccaagacccccaagtttccctgccccctcctgcctgggaaccaccctcccaccaccaccctcaccacccgcaatacccctcccatccaaggaacatcaatgcccctttcatccccacttggcagggtctactggaaagaaggagaggccaagagggaggaggtgacccacagtaggaaaactggtcgggctaaaacccagccttcaacaaccccaaatctaaggagctccccctacatcccccaatttggagcacccaacttttcttctgttcctttctcccactccctttataactttttccccagaaactggcacagaagctgggcaccctggctcctctcctagtcccctcttccctctggatgccagtttaacactctcctggacaaggaaaagcctgctggaataagggtcacagccaaaggtgcgcaagacaggagagatctcatcagcaccagaggaacctggggagagggagagcctcgagtgagaacttttgcctgcaggcttttctttgtcaaaagtcgtcttacttggagtgggggagggaaggacctgaaggttccagcatctaaattcgtctctgggtcaggatgactcagggggaacctgataaggggcctacgcaggggcgcagggcaggcaggagatgggaaatttccactgacatccattggcttcctagaccttggggtcccacccagcctgctgcaggcagaagtaaggctggttctcccctaagatatggttcttccatgtcagggcagctcccagcccaaccagggtgtaagtgttgcaaggacaatctctgtctaaactctttccctttggccagagcagcttcacactataccttcaagtaagcaacagttttaagtatctgttatgtgcaagccactgtgtagatgaaattcaaagtgtgcatctggtcacaccctctctagacatttgtgatgagaaatgacattttgacatttgtcaagagaaggtacaaacacaggacaagttatatataagatcaatcatttggacagtaagtcctatagcagtagtttcccacccttctcaagtgggagattagagatttccaaccccacataataggtatagtatcccctgatggagaaaatgcaaactatgaattcatcaatactttgaagtaagtttctgtcacaacatctgtaaatgcggtaatacctacacatgcaaggcatattatttactcagttcacactcactctttatacatacagattctagggccctttgcaagatttcagaaatcctcacgccaggaggctgtggcccacagtctagaaatcattatcttactataattcagagaaggaaaagggctttgttcctaggatgaaccaccaaatgagaagtgcaaccatggaatacttgagtgggagtgaggggcattctatccaggcacagagagagcatgaaggacagtttggaggcagaaacattcaggttactttggagaactgaatagtagcttcccatgtattatcccctaataccgtaaggttagtgttatcgtcctcactgtacagatgagaaaattgaaactcagaaatgtttagtgagttgcccaagtccactcagctagtaaatgacatatctaggattcatttccccaccccggtccattccactccagggactatgctccttccactcccaagtagcctgtcaagtgtatagcaattaggccatatgaccccagctgcagaataatctggttcttaggttttttgtttcttggggttctttttgttttgttttgttttgttttgtttttgagatggggtctctctgtcagccaggtgggagtgcgctgacacaatcctagttcactgcagccccaaactcccgggctcaagcaatcctcccacttcagcctcctcagtagctgggactacaggtgcatgccaccactcccaactaatttttttattattatttatttatctagagacaaggtctcactttgttggcctcccaaagtgctggaattataggcatgagccactgtgccctgcccaagaataatgttgatgagaggtgggtgatgtttggtagggtagattggggcctagttagttgtataggtccttgaatgctaagcaaaaagatttagcaatgagaagctatagtatatcttgagccacagaatattcttgagcaggagtaataaaaaatactgttttgtgaaaattaatctgatggggaggaggtaatagagatggattatgggtgggtgggagtgaagaattagatttagaaaagagatcatttagaaaccagagtagtcatccaactatgagatgataagaacttgaataagggtggaagcaataggaatggaaagaaaggcatagatttgtaagacaaagaaaaaaaatagaaagtggtggcattattagatgggaaaaggaggaaagtcaccagtctcgttgctctgttttaggatccgtgaggttcatctatctgtagtgcttctggccagagaaaaggccgaagagagaaaaccctgaggaacatctttgacctgcatagaaacttatctgaagattttcagaatctgagcctcaccctcagtctatcccagttttatcctgacctgtccacatctgttatactccaaggcttgctgggcccaacactggaagctatttaatgtttctattgcgactggccttttaaagccagtgggattctccatgctacacttgagcctggagactagaaaacatgacagcctgttttcattaatccgttttcattaactgctgtggtctgaatgtttatgttgtccacagattcatatattaaaatcctaactcccggctggacgcagtgggtcacacctgtaatcccagcactttgggaggctgaggcaggtggatcacttgaggtcaggagttcgaaaccagcctggccaacatggcaaaaccccgtctctactaaaaatgcaaaaattagccaggcatagtggctgggctaatcccagctactggggaggctgaggcatgagagtcgcttgaatcctgggactggaggttgcagtgccccaggatcatgccactgcatttcagcctgggcaacagacagcgagactccatctcaaaataaatacgcaaataaataaaataaaatcctaactcccaaagtcatggtattaggagatggggcattttggggggtgattaagttttatgagggcagagcctttctgaatgggattcatacccttataaataggcccaagggaactcattcaccccttctaccatgtgaggacacagcaagaaggtgccatctatggaccggaaagcagccctcaccaaacactgaatctgccagcaccttgatcttagacttctcagccttcagagctctgagaaataaatgtctgttgtttataagccacccagtttgatattttgttctagcagcccaaacagactacaacaccttccctgggctcgcctcagcttctgttgtggggcagagcataaggcaatttgactaggacccagaggatgggtaagcttggctgaaatgatggaaatgtgatcatctgaaaaggtcagaaagttggcagtttgctcaattcggcatgcaaggtagggagaccaaaagccccctcctttgaaggcaatggctgtagctggggccagaagtgatgtcacataaccactgctgaggtcatagaatcttccctctcctccctctgtctcctcattgccacagccaaccggctcccacatatctgcacacacttaaatacaaaggccgggaagggtcagaccaccatccgggtactctaaggtacataaaagaggtaggggaaagagaggatcattcagtaggtaggatccacactggtatctccaatgctggg

SEQ ID NO: 415 - DNA, 8060 bp, Homo sapiens
acaccttatacaaaaatcaattcaagatggattaaagatttaaacgttagacctaaaaccataaaaaccctagaagaaaacctaggcattaccattcaggacataggcatgggcaaggacttcatgtccaaaacaccaaaagcaatggcaacaaaagacaaaatcgacaaatgggatctaattaaactaaagagcttctgcacagcaaaagaaactaccatcagagtgaacaggcaacctacaaaatgggagaaaattttcgcaacctactcatctgacaaagggctaatatccagaatctacaatgaactcaaactaatttacaagaaaaaaacaaacaacaccatcaaaaagtgggcgaaggacatgaacagacacttctcaaaagaagacatttatgcagccaaaaaacacatgaaaaaatgctcatcatcactggccatcagagaaatgcaaatcaaaaccacaatgagatatcatctcacaccagttagaatggcaatcattaaaaagtcaggaaacaacaggtgctggagaggttgtggagaaataggaacacttttacactgttggtgggactgtaaactagttctaccattgtggaagtcagtgtggcgattcctcagggatctagaactagaaataccatttgacccagccatcccattactgggtatatacccaaatgactataaatcatgctgctataaagacacatgcacacgtatgtttattgcggcattattcacgatagcaaagacttggaaccaacccaaatgtccaacaatgatagactggattaagaaaatgtggtacatatacaccatggaatactatgcagccataaaaaatgatgagttcgtgtcctttgtagggacatggatgaaattggaaatcatcattctcagtaaactatcacaagaacaaaaaaccaaacaccgcatattcacactcataggtgggaattgaacaatgagatcacatggacacaggaaggggaatatcacactctggggactgtggtggggtgggggcaggggggagggatagcattgggagatatacctaatactagatgacgagttagtgggtgcagcgcaccagcatggcacatgtatacatatgtaactaacctgcacaatgtgcacatgtaccctaaaacttaaaatataatttaaaaaaaaaaagaaaaaaaaagaaaaaaaaaagaatattcatcacaacattgttgttgcaaaacaattgaaaataacccaaattatagaaatagaggtttaatgaaagaaattgtgacttacatgtttaatgatatactgtgccaccattaaaacagataaagcaggatgttagtcttcattatgtaaaagattgtatggcacaatatgcaggaaaaacaggaagcagatcacagaacagtatggttctactgatgtgaaacgggcatatcatatatacaggaaatcgctagaggaaaaaacacaacaattgtcagaggcgtaaactctgaacagtgtgatttttggtgcagtgaaggaacatttggatttttatttcctacttgacaaaataatatcgtctgaatgtttccactattaggtataacattctgaataatttttaaaataaatatatttacactgggaaggaaggaagacaggcatgcatgcatccctcctttccaggaactacatttatgggtatgtattttctaagcaaggagctttgagagagctaagtaagactttggaggagaaggttatattggatattctacattgaaaattctaaggacctgattgtaatacaaacatttactctttcaaaaactttatcatatgtgtgaggaaggtaacattaaatgagagaaaaaggcatggcagggaatggagatgaaaccttccttttatgaccttaagatatatcatatatgtatgaacgtagttttaatttagtgggctcttttcctctctagacctttcctgttccctaaacatccagcaggattctttttttttttttttttgagacggagtcttgctctgtcgcccaggctggagtgcagtggcgctatctcggctcactgcaagctccgccccccaggttcacgccattctcctgcctcagcctcccgagtagctgggactacaggcgcccaccactacaccggctaattttgtttttgtatttatagtagagaaggggtttcactatgttagtcaggatggtctcgatctcctgacctcgtgatccatccgcctcggcctcccaaagtgctgggattacaggcgtcagccaccctgcgcccagtcaacatccagcaggattcttttgtggtagcggagagaagaaaatgaaggtgaaaggcaaacaaatgaatgaaataatccattgcactaggcctatggttttggtttttttaaaaaactttttaacaagtttttaacaaaacaacaacaaaacaaaacaaagaaacaaacaaaaaattttcccctattctgatctgcagggaatctcatgtcctcaccagaaatattgcagaaatacttttggtcacttaggctgtgattgaccgactggacattctttgtagaatgctgcttgccaggcacacagaactacaaggctttaactctatccagaaagtaggcacagccaaaaacagggtaaaacttgcacagggcttgcttggcagaacctgacttcatattaacatctttgttcatctctatagaaactatcatcatgtggtatatatgatgcttatttactttgtctacttttatagcatgtgagttgcatgagtgcagagacttttgtccattttgtccaccaatgccttggaagactgtccagatcatagaggtactctaataagtatttgttgaatgaataaattatgtagggtttcctagtaggacaaatatgtaacaccgatcttcaagcatcaggagataggaaaaatagttgtggctgaatttttcctggttactgtcttcatgggaaattttcctcagtccagaaaaggcaggaaaggagggaccccattacctctcaggtcagtgatctcctccccaaaaatatttgccacagagcaccctgaacatcagggtttctgaggctgtagataagagggttcagcatagggttgataacagtgttgaaaactccaacccctttatccttgtctgaagcctcctctgaacccagtctcatgtagttgaagatacctcttccaaagaaaagacaaaccacggtgaggtgggagccacacgtggagaaggccttctttcggccctccactgaacggattcgtagaactgcagctgccacgtggctgtaggcagtgatgatgagaaccaaaggtgtgcctgccatgatgaaacccacagcaaagagcagcagctcattgagttgggtgctggagcaggagagctggaagagctgtgggaggtcacagtagaagtgattgacctcattggggccacagaagttgagcgtggacatggccacagtgtgggtcagtgcgttggtgaaggcacaagccaaggacgcagccaccaacatcctctggactgtctgactcatgcgggtgctgtaggtgaggggctggcagatggccaggagtcggtcataggccatggcggtcagcaggaagcagtccatcccagccagaaggtggaagaagaagagctgggagaggcaggcgtcataggaaattgtggacttgtgggacaagagacgacccaacattgcaggaacagtgacagtgatacatccgacatccagcactgacaggttccccaggaagaagtacatgggggcgtggagtttgggctccaccaagacggctgccaggatgctgaggttgcccccagttgtgaccagataggcaaagaggaggagcacaaagacaactggctgcatctcttctgtttgcactaggcccagtagaatgaactcagcaacagcggtcctattggtcccagcttctggctccatgagtttctgtaaggacatgtcccagcaggggaggtatcagttcactcagttcacttattcaacattaatattttaaaccatttatgttcaaagccccgtggcgagtccccaggccatccctcactcgttgacctcctccatcacctcaatgcctttaccttgctcttggttgacatgcccaatgacaccaccaccttgtcctcctcatcctctgctagctgaaaaggtcagaatacctggaacaacatgagaactatagttaataaagtgtattgcattcaggatttttgctgagtagattacagctgtcctcgccacaggggggaaatgggtaactatgtgagatgatgaatatgttaatttgtttcactatagtaaccattttactaactacaagtatctcataacatcatgttctgtaccttaaatatagacaaaaactttgttttaaaaaacatacaaggcttcctctatgaatatagttagatttagatgaagttttcctattgctctctgagggatcatcccaaactaataagcaggtttcaaaatagaaatccagagaaagtagaatgcatttaaaaacataacccaggctgggcgtggtggctcacgcctgtaatcccagcagtttgggaggccaaggcgggtgcatcatctgagatcaggagtttgagaccagcctgtccaacatggtgaaaccacatctctactacaaaaattagcttcgtgtggtggggggcacttgtaatcctagctactcagtaggctgaggcaggagaatcgcttgaacccgagacgtggaggttgcagtgagccaagactgcaccattgtactccagcctgggtgacagagcgaggctccatctcaaacaaaacaaaacaaaacaaaacaaaaacacctaggtttaaaggcttctagacataataaaggtcaagcaaagctgtagcaagaatcagagagaaggtattcatgattgtggatatcagaaagaccagccaagtacatttcttcaaggtgagggaccacactctgaagtatcaactcaacatttcttgttcaataaattgttaatgttattgttacttaagcccctacaatggactttgactaatgacttactgtaaaatgatgtttttctgtgtgtattatctgctattcctctctaaaaccaaagttgtggtcatagcctgtgggttggttgccgccaggtgcagttacattctgcattgcacagtcactgtccttcccttgtccttgacttaggcacggtaggttgaccaatggctctaatgatacatcctgaaatgacgaaggcatgtacttggaaaaccacgctgaagtcatttttcagattttttttttttttttgagacagagtcttgctctgtcacccaggctggagtgcagtggcgcgatctcggctcactgcaagctccgcctcctgggttcacgccattctcctgcctcagcctcctgaatagctgggactacaggcgcccaccaccacgcccggctaatttttttgtatttttagtagagacggggtttcaccgtgttagccaggatggtctcgatctcctgacctggtgatccgcccgcctcggcctcccaaagtgctgggattacaggcgtgaggcactgcgcccagcccatctttcagattttatatcctactccagatcaaaaaacatcaatgtctctattgcccatggaataagccaggccagaggttctttaaaagcaatgttactcccttgcatagaatagactggaatcagaggatgggaagcagctggaggggaacagtgatgattgcctgagctggggcagtgaaatgcagaggcaggaatgattaaggaggttccagaaatcagaaatgctgtagcagcagtatgactgatatgactgcctaggggtgtggtcaccaaaatgatgtttaaatcctttgttcataaaagtgggaattgagtgcacgggttggtggcacggtcttaactggtctcactaagatctggaaagcagaagaggcaggagtgaatgagaagccatccgggcaggctgactgtgcagtgtttaggtgggactttaaaagcaagaagccggcattatcagcagttcctcagcctctggtgagcactgactagggaagtcaagggaaaatgtactcacaatcctggaacaagtgacttacagccagtatcaaccttggctgcacattagatttatgtgggagcccccaaaactcctgttgtccagaatttacccacaggccgattaaatcagaatctcccaagataatacccaggcatcaggatttttttttttttttttgagatggagtctccctctgtcaccaggctggagtgcagtggcacgatctcggctcactgcaacctccgcctcccaggttcaagagattctcctgcctcagcctcctcagtagctgggactacaggcatgcaccaccacgcccagctaatttttttgtatttttagtagagatggggtttcaccatgttggccaggatggtgtcgatctcttgaccttgtgatccacccgcctcagcctcccaaagtgctgggattacagacgtgaggcaccgcgcccggcagcatcagcatttttcaaagcacccacctgatcactgctgtcttagcatttaactgagcagatacttccaacgactagctctttcttgccaccccctcaaattaagagttttgtttgtttgttttgttttctcattttacttttactgataaccctgaagggagagcaggaaatactttataaaatgacacacagaaaagttacaaaaatttaagataccttgcaaaggtttggtggtatttccagcctcgatttccaactctgttaaattagattcttagtccccatgcttattggaatcacctgggatgctttaagaagaaaatactgatgctcaggcctttcaccaagaattttgatttaattggtttaattggtggtacctgggtatgggtgtttccttagcgcctcccaggtggttctaatgcccagccaggacagagaactctgccagatttgcagcctgggaggcatgatgatggcttgtttccctcttcattgtttttctccataccggacatgaaggtcaccagcccttttaggtgatccagccacttccacaaagactcctccacctacgcttagaatcaaggtaatctcagccaggtgcagtggctcacacctgtaatcccagcactttgggaggctgaggtgggtggatcacgaggtcaggagattgacaccatcctggctaacacggtgaaaccccattcaatacaaaaaattagccaggtgtggtggtgggcacctgtagttccagctactccggaggctgaggcaggagaatcacttgaacccgggaggcggaggttgcagtgagctgagatcgcgccactgcactccggcctgggcgactccgtctgagattctgtctcaaaaaaaagagtcaagatagtctctaaagactgacccgcagtttcatgtggataacgtgcatctcactggagtctctacagcaaggggatgtctccaatgtgaggctgtctcgatgaccagccttccaaatgaggtctccactgtgtgtgctcaggccacggggaagctgcagaggggatgccacatgggtgagaatgtggatgcggtgatctccaagaggtccttaaagttctaagatcacatgacttggaggagggcagaaatcatcctctggcctgattatcactgacagaggtggtaactgataatgctttgcaaatcaacaaatcaaagggtgatagctctttacatatgttatattaaaggatagttgactacttccctttttcctgtcaggtccattttaacagaagcattggacagcaaccctgtgatcttccagctccttgctcatgctgttttccccacctgcaatggtttccctccaacggcacatgcccagatatttcacaacttgactcaaatgctgactgatgaattaatccttccttgaaacttctccatctaaaa

SEQ ID NO: 416 - DNA, 8060 bp, Homo sapiens
tcaagccctggggaaagatgactttaccaccagcccccaagctggaagtggaatttcgggtttcttaatgggtgcgagccacattcttctcctctaaaaacagtttgaggactttccccacttaccccttgccttagtttgggggcaggaagcaggaggagacggggactgtggctggcgcttccctcaccgccccttgggaaggaccacacaggcccaaggggacgggtgaataaccgagaacaaagtcctaataaaatagtcacttttatttcttagcaaaactatttcctccgtgaggggtatttacaacagagaaaggaaagaaggggtcaattcacagcgacttggagaggctggaggggctcgtgggaggcccgaagggctggagacagacacacttcacacaattaactggaactgctttttccggtttccgacggggacgtccccagagggacttgatggggccggggccccgcgtggcaagggaactcgcacaaaccacccgccctcctgggctggcccccggtcacccgcgggtgagctctgggagttcgggctcaggacccgggaggggggtctggcaggtcccgacgcagcccggggacaggggcagggccaaggggcagggccggggcgcatgcaaacaccgagggggagcgggcaacacggaggggggcgccggcgcgcgcgcgcggcgggggcgcgcgggggcgggaccgggaagggcagtcacgggcgccggagcagcacgtgctcgatgtaattctccagctcctcctgctcctgcagccggcgctcctccgcctccgcctcctcctgcgcgcgccgcgcctgggcctcccggccgggatagtggcgcgaaggcggcaaggcgtggtggtagtggcggcggcgcaaggccgagggcggctgcagtgtccgcggccggatgtagttggggaaagggtggtacggccctggcgggtacacctcgtcctcctcccgatcccagggcgggagcacctcgttccagtccggcagctcgtctcgtgcgggagcgggggcggggggcgggggctgcggggagcggacgtgggtgggggcgggggcggcacgggggggcggcacgggctcgggaggggcgttcttcttccgcttccgcttctcctccacctcctcgatgatgctgaccacgtcgtccgctggcaggtggagtttggtggacagctcaatgaggctgtcgatcgtctgcggatccatctcctcgtcgtcctcctcctccccgccctcctctgtcccctcggcctccttccgccggtggcccggcgtctcctcctgggagcgcttgtcctcggcgccggcttccccgtcctcctcctccgcgaacaggagcgcgttctgccgcgccctctccgcctcctccgcctctgcctccgcctcggccgcctcctcatcctcttcccccaccctctcctccccgccgcgtctctcctgctccgcctcctcctcctcccttgcactctctcgctcctccgccgcctcctgcagcccccgacccccgaggccgcgctgccgggccccgccctgcagcaaatactggagcagcaggtccgaggcgaggtcggccagccgctcttcctgcgccgcggcctgccgcgtggcctccgcctgccgccgcccggcctccacctgcgccagcccttgctggagaaggcgctcgcccgcctcggagccgcccaggagtgcgctctccggccggcgcgccttggggaacggggcggccacgccttggtacgccttggacaggggtgccaatgcctcgcctaggtgtgttttgggggaggacactccttccccgaacttgtgggtttcgggaaggggcccgctgtcgggcatacgcgcctggaattgagagggggccgggggcggcaggggcgcgcgctccgggacacgcgcctggaactctccccaggaagcgcgccatacgcgctctggccccgggctctccagattcactcgggtcagcgtgtgcgtgcgggtttccgtctctgctgccgccgtctcctgctggcgcttggcgctacttggactgaaatctcgcagttcctggagcagggacgctagcgcctcgagctcctcggagggatcgctcgcctcgggcccattctccggagtctgagggcgaggcggagccgcgggctccgggctctccggcgccgggaggctgtgggtctggctgcgcacggtctcggtcagcagagcttcagctgcttcttcctccggcccctgctgggagccgcttggtgccgggggtgaggcgggacggtcgagtgcctgcagcagcaccgcggccagcgcccggggatccacgccctggaaaagctctccctcgtcctgcggctcggaattccgagcgcctcggacctctggggcgctgccatcctttggcccgggcactgcgtccccggctaccggctctttatgctcagagctgagaggaggaggctgcgcctcagggcgaccagggggtgctgcccctaacccgttgatcagcagaaggcagaagagggcggaagccgacaatctgagggctttcatgaccaagaggctgccggagactgaaaaatagaagggaccaaaaaaagaggatttctgtaagaattcccctctctaggtctacgttcccttcccccacctttcagcaggaaacccggggcttccctgatcccccaaaccttacccagaagaggaacgtttaggagcaaaggaggaagatgttgtgccgatctctggagccgtgtaaatgggaaaataacccccgaagccctcgcttacccagggcctcctcggccccttccctgagccatctcactgccatcgcccacgtactaagcagcagcaatatgggggaaaaaaaaatctctgctccctccccgtaggactccccggatggtgcgtgggcgacttcagcagcaagagaaaaagctgcgactcccccgtttaccggggacccttaccagggggctccccgctgtgtttgcaacacccccatcgagaggagagagaaccctccctcacgcccacggctggctgccgagggtttgagggacgaacagcggagtatttaccagctggtgtcacgacgcgagaggtggagaggagggtcggggcagggtggggacaggggaagatcgggacgcgtccgcctcggctccgagcggtggccggggtaggagcgacggtcgaggtctggcgtcccgtgggctgggctcagctgggtcggcgcggctccgggcggctagctcgctccggcttcagcacgctggacagcgcccgcgcctccaccgccttataaaggggagcgcgcggggtcacgtgggcgcgccccgccccattgacgtcaatgttcattcatggggaagcgggcggccgcccggaggaggaaggacgcccgacgattggagggtgcctgcctctcccggcctgcgcctgcgcgctggggccttcggctgaaggggtgtgcgctagcggagctccgggaaatgaatgaatgaatgaatgaatgaaatgctgaagcgggcagggcggggggctatgaatgaatgaaggagggacgaggagaaaaggatgaatgaatgaatgggagaatgaatggaagggtggatgcagaggcgctggaaggcgggagggtgggttgcagagcaacttggagctgctggatggagcccgcgttgctgagtggaatagaaaaagggtagtcccagcgtctgactgggcaccagtgggagctcaatactggggaggggaaggataaagattcaagagccgaccagggggccgggttccccaccccgagaccacgcgcccaaggacggcgtgaacctgagtgcagagggacagatctgcacgcctgcgggcgctgtccgcgaatcggcagtgcgggtggcagccccctgacaggggcagatgggtggatcttgcggttttggtaatcccatcgggaagggtccgagtcggaagagaaaagggaaagaatgaggatgtgtgtgcctctgggtcgtgtctgtttcacgatccgtgctgtgtctggagaaaaaggtgtgtctgtccttctgtcccctgactgccgcttgtgtcaaggccccccgctgtgcccccttcggcccatctcttcccacactcccccagtcgctttccctcctgccgctcccctcccccaaggacgtttggagggcgagaccagagcaggtggggagggggttgcgcaggtggggggggggtgactcaactccagctctctccaccgcttaaagggaaggtttgaacgcgatgggagggggacctgcaacgtcagagatagcccctctctgccaccagccccttcgaccgtatctcctgccagagaggttggggctgggggcttggacagctagaggttccgggggtggggggcgatgacgcacagatttgcgcaaagagaatccatcagagagctgggtccggtgaagggagaccagccgtgggcgggggtgggggggaggacggaaatggggagggggcaggggagaggagagggtggcaaggggggcagccactgcaggaatgaaggggagggagggaggaagcctggagggggctgcggtgctggcagagagcggtgcgggggcgtgggcagggaaggggggaatgacaatgacacacgccagacacacacgaactgcggacataggggtgctcgtgggcacacgcagggcacccgcaccctgagactctggaaaccaaggtcagggctgtctgtcagggtcttagagactctttcagaaacggtcctcgcccccctcctcacctcttcctggcactgaccctccttctaacctccccctccctacacacacactcacgtgctttctctctataaccagcagtggcttctcgcttccatcagtggctcgactttcccagaagaaagcccatcagctctgcggggaaagaaatggggaggagtggagagggagaaaagagagaagagatgggggcaggggaggaggaaggaatgaagggatctggaacaggtagaaggagcaggctaaaggagaaaaaaaaactgagaaccaaggtgacagtggagattccaaagaaaggagggaaaagagggggtaggagaccccgaggcgatgcctcccatccccacgcacaactaaccacggcctcccctccttcctctccccgcccccatgtccccttcatcttcccagcctggatacagagagcagtgggatggggagggggtcacgttaccttcctgaggaggatgaatcagagagagatggctcagacatctggagagggggaggggaagccatccaagagagaagggagaggggagggagggagccaagggggctgactgagtggctgatggggatcagagaccaagttgcaagatgagagaagacgggcacctggagaaactgtatttgcctgttggcttgtgtatgcacacacacctgcgtgtacatgtacatggcttgtgcatgtgtgtttatgtgtgtatggagatgaatgagatacatggccggggcggggagaaaaagaaagggaatggggggaagcaattgtgtatttaatcagatcaagagtggatgggcatggtagtgtttccaatttaactatgtgatgttctattccagtctgtgtggctgtgtttgtgtttgcttccaggtgtgggtgtgtgtgcacgcgcgcgtgtgtgtgtgctgggttgtttttttttgttttttttttttatctcttctgcatgcctgtatgcccatgcagtttggagtctttgagcacacccagttctgggcatccgctggtgtccaaaaagtgtgcctggcttggtggtacacaacaatgtgtgtgtaagcacacacatgcccccactccacatccctcccttcctccacttaagctcacaagcccaggagagtttctcagaaatcagcatccccaaggctccagtcgtcctgtcgtgagggagcggggtggatatgaatgcctggggcacaaaaggcttggagattccacaatctgggtcttgactctgtctgcatggtctctggactcattctgtttctgcctctctccatcccagttccctacctgggtcagctcattcacacactactcgcctctactgggggtgagctgtgcccttcataccctgctgcctctaggggcttctggactgggcacaggttcttgggatagggaaaggagggagacagtagaaaaagaaagagaagtgaagagactgggagagacagagtgctggaaaaggcagagcccatatggggacctagttggggatgcctggtattggttctgacttgtttgtgtgaatccatcatctctctttgtatttgtttctaaatctccctccaagagggtagctggagaagatggggtccagcatcgtagggttccaagctgaagatgtggaaaaccaggagagtggggaagagcactgggtcttttccctgagaaggtctgggagagaaagagagagcaggggcttgtggaccccgaagctcaccggtcccctcttctcctccccctccccccaaccggtgactcacctctgcagcctttaactgcgtcagccatggtggaggggcaggcagggagggggcactttatgagaggggaaggggtctccactttgaacttacagaagatgctgaaggccccctgaaaattgccccatttagaacacactcttgccctatcctctccccatcccagagctggggaatcctggggaagggactgaggggtgggctgggggctacgggagggtctggaatgatgagtgatgggaagggggtgcccaccctgatttttagtcctgaggtcccattcgccctcagacccccacccactcctgagtgggggaggggagacccagcaagcgggggagggcaacgccgcagagatgagtcaccaagaaagagagagagaaagagacagagatggggagagacacgaagagagagccactggagagactaacacacacacacacacacacactcaaatacacacacagacacacacacaccatcaaggtggtatccaccaagagaaagaaaaccacttctgtcatcctgaaccagcctccttcaacttccacctgtcacacacataacacactgtcctacagaatcacactgagattcggagacacacccacttacacaaacacaatgtcacacctagcctagcagttacccagacctaggctggagatgtgtgcagggcaatggaggtgtgctctaagtgttctcactcattccttttaccaggtggagggaggggcgccaaaaccctcaaggaatgcgacttcagagacccaagacgcggttgcagggactcacaggctgcgctgtgcacactcgacaatacacacaagtcgcctgcctccccgtccacacgcacatagtaacatatcaagcatcgtcctcatcaaaaagcaacagaaaaaaaaccacttgaggtacctgattctggggtacaccaggcacgttgtcccgaatccatcccacccagacaccccctgactcgtacacacatgtacagaaacgcagacacacaaagacgcccacggacacactcacacggacgaaaaccaccttgtgctgccttgcccgcgtccgcgcacgtcctggcgcccccgtgtgttactttgggggatcgcagtctccgccaatccagagcaggcttcgcgggggcggtgcccaggctctctccacctcctccacccaccacgggttgcccacctagaaaaggggaaagcgataccggctggccacgggcaagtctggaactgggggttagatgcctggatcctggctgatggaagctggtcttggatgccaagtgggacttgggagaagaactcacagaatttgggtagcagccgactcccaggtccagggaaaagcgaggcccagggcgagtcaggaggccgtgctgctgcccacctcggtcctgagcagcggcttctttcctccgcttggcaggggtggggtagg

SEQ ID NO: 417 - DNA, 8060 bp, Homo sapiens
tcccacccacatcctgctgattgatccattttacagatagctgattggtccattttacagagtgctgattggtctgttttacagagtctgattggtccgtttttacagagagctgattggtgcgtttacaaatctttacctagacacagagcgctgattggcgtgcttacaatcctttagctagacacagagcgctgattggtgcatttacaatcctttagctagacagaaaagttctccaagtcccctacctgattagctagacacagagcactgattggtgtgtttacaaacctttagctagacacagagtgctgattggtgcatttacaatcctttaggtagacagaaaagttctccaagtcctcaccggcccagaggcccagccatcttcacctctcaagctgtctgtagaggtccacgtgtcaagaaaactgaggacagaggccctcagtccagttcccacaagcaactgcatctccccaacagctgcctgaatgagtttggaagcagtcctcccaccattcagccttcagatgaaactgcacccctggctgacaggctgattgcagccttatagcagaccttaagcctgagacattcgacccacagaaaaggtgataattttggtctttttttttctaaacaggttcttgctctagagtgcagtggcacgatcatggctcactgcggcctctacatcctgggttcaagtggtcctcccacctcaacctcctgagtggctgggactacaggtttgtaccaccatgcacagctagtttttctctttttttcttctttttgtaggtacaagggtctccctgtgttacttaggctggtctcaaattcttaggctctagcaatcctcctgtctcagcctcccaaagtgttgggattacaggcatgagccactgcactggggcaatgttggtcttaggctaattatgcagcaggagatacatgcactgtgctttgggaattgaagtcacttctatttctttgtggcttcatcagtaatatggggcagggggcacggttcccacagctgattcttgagtgttctttctgagtatccttaatacttcacacactatcatatatctgaactttgttcattgattatctcccctttaattttcattccttgatgaatctccagggtctggattaagtcctaggatactttatgtactcatgaaatcttcaatgaatgaagaaatgattttttttttttttgagacagagtctcactctgtcacccaggctggagtgcagtggcatgatcttggctcattgcaacctccacctcccaggttcaagcaattcttctgcctcagcctcctgagtagctgggactacaggcatgcgccaccatgcctggctcatttttgtatttttcagtagtgacagggtttcaccatattggccaggctggtcttgaactcctgacctcaggtgatccacccacctcagcctcccaaagtgctgggattacaggtgtgagccactgcatccggcggatttttttttttttttttttgagacagggtctcactctctcgttcaggctggagtgcagtggcgtgatcttggctcactgcagcctccacctcccagtttcaagtgattctggttcggcctcccaagtagctgggactacaggtgtgtgccaccatgcctgtctaatttttgtattttcaccacgttggccaggctggtctcaaaactcctgacctcaagtgatccgcctgcctcagcctcccaaagtgctgggattacaagagtgagccaccatgtctggcctgaatgaagaaataattttttaaagagtgttttaaagtggggccgggtgcggtggctcacacctgtaatccccacacttttggaggccaaggtgggtgggtcacttgaggtcaggagtttgacaccagcctgaccaacatggtgaaaccccatctctactaaaaatacaaaattagctgggcatggtggcagatgcctgtaatccccgctacttgggaggctgaggcaggagaatcacttgaacccgggagggggaggtcacagtgagctaagatcgtgccattgcactccagcttgggtgacaagagcgaaacaatgtctcaaaaaaaaaaaaaaaaaaaaagaaattgcatttcaaagccaggtgcagtggctcacacttatagtcacagctacttaggaggctgcggtgggagaatagcttgagcccagttgttcaaggctgagtgagctgtgattgtggcactgcactctagtctgggtgacagagtgagaccctgcctgtaaaaaaaaaaaaatctttcaggccagacgcggtgactcactcctataatcccagcactttggaacgccgaggcgggtggatcacctgaggtggggagttcgagaccagcctggccaacatggacaaaccctgtctctactaaaaatacaaaaatagccgggcatggtggcacatgcctgtaatcccagctactcgggaggctgaggcaggagaattgcttgaactcgggaggtggaggttgcagtgagctgagattgtaccactgcaatatgagactccatctcaaagaaaaaaaagaaaaaaaaaaaaagatagcatagcaatggctgtgggcctggatacaagtcttagcctctccacttctccacttcctggctctgtaagccttagacaagttccttaactccacacttccatttccatgtaacaaggggttataggccaggcattggtggctcatgcctgtaatcccagtgctttgggaggccaaggcgggaggatacttggggacaagagttcaagaccagcccaggcagcacagtaagacattggctctagaaaaataaaaataaaagaaatcatccaagaatggtgacttgcctactattctactcgagaggctgagaggggaggatttcttgagcccaggagtttgaggatgcagtgagctatgatcacatcactgtacttcagcctgagcaacagcaagatcctgtctcaaaaaattaaattaggctgggcttggtggctcatgcctgtaatcccagcactttggaaggccatggtgggcagattgcttgagcccaggagtttgagacgaggctgggcaacatgacgaaaccccggctctaccaaaaaatacaaaaaattaactgggcataatggtacatgtctgtggtcccagctactcggtaggctgaggtgggaggaatgcttgagcccaggaaataggggctacagtgaaccaggatcatgccagtgcactccaacctgggcaacagagcaagactctacctcaaaataattatttaaaaaaatggattaattgggcataggtggcttgtgcctgtagtcccagttactcaggaggctgaggtgggaggattgcctgagtctaggaggttgaggctgcagtgagccgggatggcaccattgcactccacctgggcaacagggtgagaccctgtctcaaaaaagaaaaaaaagggaggggttataatcactcctcctgacatgatacagagtatccatttgagttcataacataaatatgtacttggtgaatgctctgtaactattggcttttttattgttcccattttacatataaggaagctgaggctttgtgaggagaaatagcttagcccaggtcatccagtgggaagcgtctggtgcagaggaatagtgatcatggtgggactttgcctagcctaaggttcagcatacaatattcagtcagtactcaagggctgggctgtttctggtaatcaaagggctgccttgttctcctgccccacagcacaggaaattccaaggtggttttctttacaggctcctccgcttctgtggccagaggggacagcggaggagcccaggtacctaagccaactcaagagaagatggaattgaatatttcaaccaccttatctaggcctctgtgattgttgaggagggggctgtcactgggaaagttgtgagctgctttggaccttatctgggaatttccttgggcttacagcctttaccctatccttgaaatggttctggtttcatagcaacttctaggtggtgtgggcgaagtttgggactggtttagggcggggacaagaccaagaacacaagtttccttgtactacgggagagagggaggggaggaaattggagaccccagcacccccttgctcactctcttgctcacagtccacgatggcccggtccctggtgtgccttggtgtcatcatcttgctgtctgccttctccggacctggtgtcaggggtggtcctatgcccaagctggctgaccggaagctgtgtgcggaccaggagtgcagccgtaagaatggggaggggagaattgggggcttgggcgttagcctgtgtggagggtgctgcattcccttctattccttccctagaccctatctccatggctgtggcccttcaggactacatggcccccgactgccgattcctgaccattcaccggggccaagtggtgtatgtcttctccaagctgaagggccgtgggcggctcttctggggaggcagcgtgagtcttgggagagtgaaagagggaagggtacagagctggggtagactcattatccccatgaagggaagatttgaggggggtgaactgaaatagacattgtggggggatattgttacttactttattttatttgcttattattttttaattttttccgagacagagtcttgctctgtcacccaggctggagtgcaatggcacgatctcggctcactgtaacctccacctcttgggtttaagcgattctcctgcctcagcctcccaagtacctgggattacaggcatgcaccaccacacctggctaatttttgtatttttagtagagacagggttttaccatattggccaggctggtcttgaactcctgacctcatgatctgcccgccttggcctcccggagtgctgggattacaggtgtgagccactgccccccagcctattttcactttatttaccaattttaggacctgatatggtcccacgttctgttctagacaccaagatacaacaacaaatgatcctttttattctaatggagggaaatgaacaaaaagcaaggcataaaaaatagcagcagccgggcacagtagctcacacctgtaatcccaagtaaggccaagttgggaggatagcttgagcccaggagttcgagaccagcctgggcaacatagcaagacccccatctctataaaaaaaaatttaaaattaactgggcttcatggcatgtgtctgtggtcccggctactcgggaggctgaggtgggaggattgcttgatcccagaagttgaggctgcagtgagccgtgatcatgctactgcacctcaacctgggcgacacaatgagaccctgtttccaaaataataataataataaaagcaaatatgcgctgctgtgagaattaacagagacttacttgggtgttcagaaagggcctctgaacaggtggcatttaagctgagattcatatgacaaggatggagcagttatgtggagatcagggagaagggagaatgcaaaggccttcagcaggcacaagcttgccatcttcccagaccctagcttttaactcctcttccccaggttcagggagattactatggagatctggctgctcgcctgggctatttccccagtagcattgtccgagaggaccagaccctgaaacctggcaaagtcgatgtgaagacagacgtgagtgtcatgggggctggcaagaaatgtggggggaggacccttaggttgtggggatgggcaaaaatgctcccacacttggctccctggcagcctaggtatgtgcgctgggagaaattctttccctgcctcaattttctcaccagtaaaatgggtccagttgggaggtgcaaagattagagggctctaggctaatttgcatagcacttgtgtggccagacctgggccctgcagctgcagcctttgctaaaaccactagatcctttgtggtgtgaccgctggttttctttccactgtttcccctttctctttttcagaaatgggatttctactgccagtgagctcagcctaccgctggccctgccgtttcccctccttggctttatgcaaatacaatcagcccagtgcaaacggctcgtctccgtggtctttggggtggggtagggtagggtggggactgtacaaatgaaatgtttctctaggttgctgaatctaaccaattaacccgctgcctgtggtaacgtcagtggttgctaggcagagtttcactgatgaaagccctgtgcagtaggagcgctcctaagcttaggtttcggacacaagcaaaggaaaacctaagcagcccaactaggggattgtagtgtcctctctagaccagtgggagggagccaatcggactacgcggaggatataaatcgcacagtaaaggttttcttggaagattatctggaaagggaggtgggaagtaacctgcgcctatctgcccagttttcctccttttcgcctttgagaacagtaatcgctcccgccagctcaagatcagctcctcttccagcctctttctgtcaatcctgcccgtgcccccttctttgcatttgtatcccctcccccaagtccgctccgatccaatccggagactcgactctgccccccgtactccagactaaatccgttcctcggctcagctaagcagctctgcacgtcccttcccacttgctcagccaatcgctgggctcggccccgcccctttgggcttggtccttctcacgccaccaatccgcgcctcttgtcccgccccctgcccgcgagtccgccaatcccgcccttcggaaagcgtcgcctggtatccagctgccggagcgggtcgcgccggaggggggcggaggcggaagtggcggtgccgggcccggggagtaggaaggagccggggctgtagccggagtggagcggctgccagccgaggagcaggcgcggccgcggcgccatattgcggccctcagcggccgcgaccgagtcatggctgagacctacggtgagggtggtggacgaagctggggtcctgggtctgggcccagggaggatgcggcctgtgggaatgggcggggctttgtagatcagggggcggggtctggtgtgatggaggcaggacctaagtggatgctgggaggggtttagtgggtctgaggctgagcttaatcgatttaggtggagcctgagggtctggtgcgtgggttaaatagatctggggcgggatttgagggagctggtcctgaggggttcagggaggccctgagggaagaggtgggccttaatggatctgggcggagcctgagtgaaggggcggggctgactgcatgaatggcaggagtcgggcttatgggctagagggaacactgaatggaagctcgggaccctggggctgatctggctggagagagctctggaatgggtttggggatgggctgtccttgagttaggggcaggacttagtggcaaagggtgggacttatgcatgagaatggagccgggttctgggcagagggagggaaggagaggtcgggaagtggaaaatcagtagggatgcaccataggaggtggtgattggaggcaggggaagtgcaggtttaggagtcagagggagccgcattcactcaacaaatatagaagagaagggagaagagtgcaaagaccctgaggtgagaaccagcttgtcattttcagggaatagactgaaggtcaggagctatagtggagtgaatgagtcagagggtggtaggaggtgaagaggaacaagggctatatcgtagtccttgtttaaatagctttcaagagactttagcgacaaaatagctaagatctgggactctggagcccttggcctaggtttgaatctcacttctgcccagctgtgtcactttgggcaagtcagttaacctttctggcctgttacctcatccggaaaatgggaataatttttagtctacctccctcatagagttttcctgagga

SEQ ID NO: 418 - DNA, 8060 bp, Homo sapiens
aaccacactgagggagaggtggagagaaggttagctggggctaggcagagcgatccctggagtgggcattgggcctgggaagatggctggagcagggcagggtgggaggggatggtttggggacattgggagaagggatgactctatttgggagtggggatgtgtctgggtgatgtgggggtggagctctgggacagactctggggagtgtctctagggcactcctgactgtggcctctccccttcagagggggccacagtgtcagctctggagacaagctgccagaaagaggcttctggtcatggccctcccgtatgctacccactgcgttcaggatggtgggaggatggagccacccccgtcacgctccctgctgtcccccttcctagccaggctctgtttcctgttttcaggcttcatatcctgaacgctgggatcccccaggacattccctggcccccaggccccaggtcccaggccccagggctgagctgtgggcaggccccacctggtgagttacttggggactgaggatggataggaggaagcacagaggaggctagaggctgagattcgccctgcgggaagtgtgatggggcatgcggctgggctgcactggaggggtgggtagacgctggcactgggaggataggtgggccagcatcctggatgaaaggctggagatttggctgctggagggttaaaggtgaaggaggaacatgggcggctgagatggggttaatttaggagcctagacctggagggaaggagcggctgcccttcttggggctgagagtggctttggggaccctgggagtgtgtgggtgtggggtgtggggtagggccaggcagcaacattccagagatactcaggggggtaaggggccagcaaccgcgacctttctctcgtctcagaaaaattataagcagatgtgggcgcctcggggaggcgtagagcagggagccagagcaagttttgggaacacggaatgcagaccctgaagccggctgcggggatgggcactgcggtaactcatcctctcctgagctcaggagctgaggcagcagagccgtctgaagtgctgggagccaggggtggtggggatggagaggaccccatttccgaatggctgacagggcagtctgagggaggcgggagcttttccttaaatgcaaggccaggttggtgacctcttcaggtgatggcacctagagttgggtgttgtggtgtgctggctaaggtgtcacaactgactctgggagggagactggccttgggttttagtgtttgctagtttctctggtgtcaataaccccccatgcctgatttcaagctactcacgtgacatcactgaacatgttgctaggaagagatgcatacaattggctctctgggcccgtatgaggtggttccagcacaccactggttgggaggtcacctggacccagccccactcccaccatatagagcaggaaacccctgacagcgtttcatcaggctggttttggcttctgcctgcatatgtccagtgacagggaactcaccacctgaggtagccgattctattcctgagccgctctgactgttggaaagttcttcctctgactgagcccaaggctgagtccctcatcacttcccctcactggttccagtctcacaccttggtacaaatatcaaagtgccctgggtagggcctgggctgggggctggggattcagagatgaaacgcactgggtccctgcctctggaggtcatggtcagggagcaggcactggaacagtggggtgggggtgaatgatactgggacccccagaaggaatgagtgggatcatctgccaatgagcatcaggaagtggaggagggaaggggtggcacctgaactagaccttgaaagatgggaactccaggtgaagaatgagacgtgagggtgtctaagcaaactatgagcaaagaccggaggcgtggaagtgactgcagttcaggagtgaggtgtaggggagctggagctcagagcaaggggccagaggacacggggccgcagtctggtctcttctgcatgcccacggctcagatctctgcagacaggtcctccaggctgctggctgcagcgccactgcccactctgcgccggtcttgctgcaggcctctgcaatgtcaccgcctctgtgtcccctccttctcctggctgtgggcctgcggctggctggaactctcaaccccagtgatcccaatacctgcagcttctgggaaaggtgagagggcccctgctgcaccttgagggcaccaagccctagctcccgattgtccctattgtccctactggggtccttttcttggtccttccttaatctccttccttctctctagtctctcccctcccgcctatttctctgtttctgctctctctactcctctctatgggttgcctttgactccagccccatttctgaccttgtctcagtctctgaaccatcctttctctttccccgtcccttagttcctgtgggaggccaactttggaacagagcgcagagtgggagccattcgttgtggagcaagcagaggggctggcccagggggagcaaaggaaacagggcggggagaaaagacccagggcagaatatagccggaaatacttcagcccatcgccgccagctgggcccaggagtcagttctcactcaccctttccatacagggaggagagggcagggagagaaaaatggaaggctccggtccaatagagtgggaagggcgctctgatggagggtatcccaggaaccttccagttctgggagaagcctccagacttgagaggtgggacaggatgggggtcccatcctaggctacgagagcagccccagcgttgggctgtggattccccactgtggccaagccctcatggccattttcccgttgtggccgctcaggcctcctcctgccctcggccctgaccctgttccctgtcttgcagcttcactaccaccaccaaggagtcccactcccgccccttcagcctgctcccctcagagccctgcgagcggccctgggagggcccccatacttgcccccagcccacgtgagtgctcctcatcctccatgggtggatgggctacctgagtcgctgcctcagcctggcccctggccctctgtacctgttcacttctcagaaactcagaggaaactcctggcttctagggattcattctgcatggtctgtgtcgggtacgtgtgtatgggatgtatatgtgaatgcgtgtatgtgtgtttagggtacgcatgcatgttacagtatatgcctgtggggttggggggggggcaagaagggaatgctctttctttttttaatagacaaggtctcgctctgtcacccaggctggagtgcagtggcgagatcgtagtgcactgcaacctcaaacagggaatgcgctttctatgcgccctcagcccagagtgttgagtggtgccccttccctggcctccccctggccacactgtggtgagtgcggacagcagggagggctgagggccgccttcctggcctccgcagggttgtataccggaccgtgtaccgtcaggtggtgaagacggaccaccgccagcgcctgcagtgctgccatggcttctatgagagcagggggttctgtgtccgtgagtccagggttgggttagggagcggggtggggcaatggaatgcggggagcttagcctactcttctgagtccctcccggcccccgctagaatggggttactcctctgcccttttgggttcccccctcctctcctctccctggccttgtccccaggatggggatcagcacttccctctccatcaccacttcacacccctgtctccagccggccccatgtgtctcccaccccatctctccatgtccctcaacagtgtctctgcatcgctgtctgccctagagctcttgttctgtctttgggctgtctctgtctctctgtcactgtgtgtctcaggacttggtgtctgggtctgcctctgtctcttcctctccctgactctctgttgctattggtctctgacttgtcactatccagtctctcctgcccactgcacccccctcccagcaccctgtaatgactggagcctgtcttcctcttcctcccacttccctcagccactgcccatcacgagcctctgcaaacactgctctccagagaaccccgaccgccacctgccctctctctggacagtgtccatgttcagtccccttttgaggatctcccccaaagcattttcccaacaaggtgctcagacaatttcacaaaaaggaacaggggaacccagaacactggcatcttgctaagttctccccctgagttgctgcccctcagtctttatcttagaggcagaattggggcttggagaacttcaggtccctggttttggaggaaggtggggttaggctttgcaggataaaagctgggtaggggcaggggtggacacatctcaccacacccatctctgtcccagcgctctgtgcccaggagtgtgtccatggccgttgtgtggcacccaatcagtgccaatgtgtgccaggctggcggggcgacgactgttccagtggtgagtggctactgaccccagggagtggcctcttgtgccttcagggccacaggaccctcaggtacaccctccctaccagggcacaggggcttaggaccccagggcgattacccgccagagccccattgctgccatctgccttttctggagatgtggaagacagggtgggcctgtgggggctgggagacagaggctgggagacagagacggggaggctggggatggactagacccctggtgacccccttcccgcctccttatcccacagagtgtgccccaggaatgtgggggccacagtgtgacaagccctgcagctgcggcaacaacagctcgtgtgatcccaagagtggggtatgttcttgcccttctggtctgcagcccccgaactgccttcagccctgtacccctggctactatggccctgcctgccagttccgctgccagtgccatggggcaccctgcgatccccagactggagcctgcttctgccccgcagagagaactgggcccaggtatgtaatggggggaacgacactttaacaagatcgcagacacaaggccacacagatctatgtggggaaatgaggtgactcagacagggccccaagtgtggggatgatgtggaggccaagatcctggtcccagtggatcctattcctcacgagtggagtgaccttgagcaaatcattgactcgttgtgggcttgtttcctgtctgtaaaacgggaatagtattgtctacatggcagggtggctgtgaagataacatgaggtagcacgtgtgtgaaggcatgctgcaaagtgaggctgggacaaggacccagagaaccctgttgcaaggcagggtgcagggggagctggggagtcccgggagggagaaggtagacctaggtggaaatcaagatcacgctttgtggaggcgctcgtggagttgagcctactacagtagcacagatgttccccgagagtgaacagaccaagccaaggtgaggaggtgggggcgcccgagaggcagacatgccacccgtggctctttgctcacccccacctgccggtgccagggtgtccctgccatttccagtcctggaaacctttgctttctgactcgacagtccccagcaggaaagagcaagtgtgaatcactaagtcctgaggtgggggttgtgggggcagtccttggaggcaagagaggaagcagttattgcttgtttgcacattgactccacccactctgtcctgcagctgtgacgtgtcctgttcccagggcacttctggcttcttctgccccagcacccattcttgccaaaatggaggtgtcttccaaaccccacagggctcctgcagctgcccccctggctggatggtatggagggtggggcctgtgggcatggggtgtgggtctggggagaattctgtgggtggtgctaagcagggctccaaggtgagtgaggggggtgagctctgtggttatgggggtgtcaaggggtcctgtggccttggggaggaggctgggtgcctggggccctgttgacctcttatccccacagggcaccatctgctccctgccctgcccagagggctttcacggacccaactgctcccaggaatgtcgctgccacaacggcggcctctgtgaccgattcactgggcagtgccgctgcgctccgggttacactggggatcggtgagtggcgtggggcgggcgggagacgggagggaggaggtggggcgccgccaggctcactcagctaggtgcccaggtgccgggaggagtgcccggtgggccgctttgggcaggactgtgctgagacgtgcgactgcgccccggacgcccgttgcttcccggccaacggcgcatgtctgtgcgaacacggcttcactggggaccgctgcacggatcgcctctgccccgacggcttctacggtctcagctgccaggccccctgcacctgcgaccgggagcacagcctcaggtgggccgcgggacatgtggtcaaaggatcaggaggccaatggggaggtcttcctggccgaagtcaccacagagccagggccatatccaagggggacaggtgtcacagaaggggaaagggagggacctcaggggccgggaggggcctggggtaccgctacttgccccaacccagttttcagaatagcgcggagcctccctagtgacccccttaccccagcgatgtgcgaatcccactgaccacgcggaggggtcgggaagctgccctgcccctgcccagctcagaccgcgccacgcccccgcctctgcccccagctgccacccgatgaacggggagtgctcctgcctgccgggctgggcgggcctccactgcaacgagagctgcccgcaggacacgcatgggccagggtgccaggagcactgtctctgcctgcacggtggcgtctgccaggctaccagcggcctctgtcagtgcgcgccgggttacacggtgaggcgcgcccggctgcaaggaagcgaggcaggtggagaggccaaggaatgggccgcccctctcacccgctcaccctctttcagggccctcactgtgctagtctttgtcctcctgacacctacggtgtcaactgttctgcacgctgctcatgtgaaaatgccatcgcctgctcacccatcgacggcgagtgcgtctgcaaggaaggtaatagggtggagtttcccagagagaagacttgggggatggccaagggaagaagggagagtccaagagtatgggtgggccaagggcaggggagcggctgcagggtaagggtggaggggcagcagctggacacagggaaagtatccaggctactttcttcctggaatatccactttgcttttcttcaaccacaaagatcctacctgtccttaaaggctgaggccaaaagccacctcactggcgaacgtccctcaccctcagtcatacggaaacacaattaccatgctgggaagggcctcacatctgccagagtgacacattggcaacctttaggctggactcggatacagttgtgctttgtttggctaacaagtctcccatcttcagtccccactactccctgttgtctggcacatcctctgtataagtcatttagttacctgatggggcccctgtaaacatttgggtttagtgccatcccctttattttgcagaaggcaccccagacccagaatggggtggtacctcactggaaggcagttagccttctgctccgcatcaaataactcataagcttttctcctgtatggtgccgtgaacaccccccacccaccccagctcatagcatagaatctggcccagccagctcccactgtgtgcttgctcaggaagggaaatgggtccccatacctacctaccaggcccctcctccaggttggcagcgtggtaactgctctgtgccctgcccacccggaacctggggcttcagttgcaatgccagctgccagtgtgcccat

SEQ ID NO: 419 - DNA, 8060 bp, Homo sapiens
tccaagtctccctaccctccaggctgtgtcctttcctggtaccccttggtctcagtgccaagagccacctctgctaggtaccggaggcctctggaacagaatgttcccgggtaccagggcagccccgactctgccggccgactccctggcttggctgtgggccccagatcccaggggggtggagaagcgagaaggaatgacatgccacctggggtggctggcagagatcagactgtggctacaggtctgggttggggcatctctgccaaatgacttgatgcctgaccacttcagagacatcgggcttggctacccaaaccacattttggctcagccaggccaggtattccggctcctggggctcctcattcctggagaggacctttgcccatctcttctccccactatacttttggtgccctcacttccctgggacccattctctggcatggggagaagctgccatgtaccttggcaagtgggcctgcctggtcactcttccctcccaacgcatccagagtttgtccagctaggagcctggaccacaaagtctgttcttctgaatcccctcccagagacagggcctggcctgcctgtttcctccccacctccccatatcctggacggccccttatttcctcaattccccacggcgtctcctgaaagggcatgaggcatctggcagtgggtggtggcagacgtggcacaagctgactcacagcagagatggcatggggtggtcctcccaggggtggcaacaaagggtgatgggcaggccttatgtgataagaagggaaggagaccaagagaggaggaggactcgctaggaaggttgctgggtggcttgggtgcagggctgattcagcctgggggcaagcaggaggctggccagtgattcccagggggcaccaacactgatgaataagcctggaatgttggcatcactgcctgaagggcattggccccctctgttgtacctgcctcacactgagcttggtgggcggcacccaactgtactcttccatctccacccacagtctggagacaggagcttctttgggccaggttgaggtgcaggatggaaggaggctagcaggggtcctgagttctctctctgcccacctctgccctgctgaatacccccgacccaacccacagcccagtctgtgttagtgcagaatccttcacaagagtgatgtataggggaggggcggagggccggggctccagctggcctgacacagaagggccggatcaggggtgtaacccctcccctcccctactccttgaatctccaagctcagacccagaggtgacaacattggagggtccctggcctgggaagagggagaggtacagacctgtggcccttgaccttccctccccacacagctgagcaggcagcttgctggagtactgaggcagcactaccccacactcctgcccgccttccagcactcccacataggaggaggctggagaggacaggccttggtgtgggaaacagggcagggcctgggaggcccccaagcccctggaggcaagcagggggactgtgtatgtctacccaggtgactagagggcaaccgaaatcaggggcattggaactcaggggaggttcagctcctagaccttctgcttgacagaagttgtcacaaatattccaagcaatatcctcccacccaaacatcttagtcctttcccaggagagactgagacttggctctctaaaggggagtcagctctggcctcacagaccagagtctcatttttagaagggggcaagagagagtcaggtgtgcatgtgaagacttgaatgtggagacctgctgggtcccctggtgcaggatgggggctccctggggtgcctctgccagactccaccctgaccctacggcctcctcctccggtcactcccttgatgaccttgaccttgaattaacctcagctcctgcgggatggtcaagatggaagaaggaggaagggggacagtggaaagaagcctagcgaacccaggacgcctccggagcccaggctcccatcatttctggtcctcactgtcccctttcgcctctggagaacaggagcaggatgggaacaaaataccgggtgaagggggagggaggaggtcttggcctgaagtctgggaggtggcagggcgcgcccttggcacagccctttctatcccaaccccaggcccgctcaggttgatcccgcagaaacagaacttctcgcgggccagtcgccagcacctagaacttgggaagggagcagacggattagaggtcgggggagtgctgagtgtgagcggcggcctccccacacccctttcagcgccaggagtctgggctccgcctgccttcgcggggagtaatttattcatggtgactccctcaggagtaacaatcatccataattagggttaatgatgacattcattaattacgatgacttctctttttgcttctacccgctccccctcctctggtcccgctcccgtggtggggcgcggggctgcctgtctttctggtctggagccacaaccgcaggcccccgtcctcgcccgtgaccgacggccggcgctgctgcaggccccctcgcggactccgcagctgcgcacccccggccgcggcctcgcgtccccgagcccaacagggctaggagcggggaatgcaggactgcggaggggcagggagagacgccctgagacgcggagataaacacccggagacgccgggagagacggggagagacgcacacagagacaccaagacacagacacgcaggttgtagagacaaattcagagacacgagcgaggatagaggcgcggactgagcccgggactgggacccggcggccgctggagggtgcgcctcgcacgcacagccgggcgcgtaccccgcccgcaccgctccacgcgcgccctccggcctcgctgcgcccatctctccaacgaagaccagtggccgcctccccagaaggtcgcgatggcgcgcgcgggcgtgcggtgccggtgtgatcgggggctccttgtggcccctcgtcgccaacccactcctacccccgggagcggcgcggagcctcagtggtcacgcgggcctcgcgaccgcgaccctaggacgcccgggcccacaggaggaccccgccgggaagagggcgcccgggcccggggcgcggacaggccttgcgccccccaagttaccttggtttcctggagggcggagacggtccctggggggctgtgggtggccgcgtcatccggttcgttctccttctcgctcatctcggtcatggttcggggagaggggaggagagggtgccgagatccgacggcaggcccaccgcgggcaggctgcgggtggcgggcgtctccgggactctgaagccgttctccagaggctgcccccagttagcccccggcacggcagcccccaacccgcgggagcgggcagagaaagttgccggggtggcgggcgaggggaggccaccacgctgagccgcaggagcgggacgaccccgggcgcgaggaccgagggtctgcagaggatgctgctcgcagcgcggggaggagggaagtggggccgcggggatgagccgagggagggagccaaggagctgtccgtgtccagccggctccgccgtccgctgcgcccgccccccatcccctcccctcccccgccggccccagcccggcacccggcggcccctccgcccagtcctcgccgcccaactttgatttaggaggtcgcctggtcccgccccctgccctacgccgctcccccgcgcagccctgcaaatcaggctctcagctattggctgcctcggtggccaggagggcgaactgggcggagtcttggggggctcgacacgatggggcggggcttggcggggaaagaagcggaggagggagtttcacactgaaaaacccgggatggaggggcgtgaccagattgagggaagcttggggagatcatagtagcgtctggatgggttgcagggaatagaaataggttggggccgcagcaagatagcggagagtgagatcgaagctaggacttccaaagagcgaagattgatagatgccagaggttggtgaaggaagaatggggacccatctgtgccattaattggatgcctttataccctgaaaaggctctctccaaatatacacacaactggactatggtgtatgtgtcaaaggccaggccggacaattcctccttgtgatggaaagccggatgactctatccccttccagtcttggcgtctgaacttcagcagagatgggggctcagtcctcacacccaaagtccccaaacttctctgagacacgctcccctcctaaagatcctaccacaactggagttagatcaggggataatacagagaggtgggggaagaggtcctcaccatcaccttccaaggtgcccctctctccacaataaccttctattttttatttttttatttttttatttagagacagggtttcactctttcacccaggctggagtgcagtggtgcgatcataactcactgcagtctcaaactcctaggctcaagcaatcctcccacctcagcctctctagttgctgggaccacaggcatacgccaccatgcctggctaatttttaaaatttattggtagagacaagtcttgctatgttacacaggatgatctccaactcctgggctcaagcgatcttctcactttggcctcccaacgtattgggattacaggcgtgagccactgtgcccgttcaagatatttccaatatttcttcttctccttctcttcttcttctttttttttttttttttttttttttttttttggagacaggatcttgctctattggccaggctgtagtgcagtggcttgatcacacctcactgtagcctggacctcctgggctcaaccctcccaagtagctgggaccacaggcacatgccactgcacccagctaattttaaaattttttgtagagatggagtctcgctatgttgcccaggctagtcttaaactcctaggctcaagtgaccctcctgcctcagcctcccaaagtgctgggattacaggtgtgaaccaccacacctgaccaagatacctcttctaatgcatgttgattatctgggacccattttctcaggtccccctccctcacctccagccctctttccttctgccccttctggctctgaccagcagatctggcttcctctcttggtctgcccaagaaaagggagatgcactggtggctgagagaacctttccctggtgtgggtggagagacttctgggtttaagtctccctcctcctctgctgtgggtggtaagattgtgggtggggggtgccacatggggggcctgaggtgctgaagggggcccttatgctagcctgaaagttgaggggtggggtgaacacctccaccccccactcacctccccccatgcacacagccattcataggatctctgccctcccaagcacgagctcaccattggagccctgctcaggttaccctgtccaggaatagagatttatttgccagtggcagaagtaggacaagggcacagtgagggttcatggttgtaggggctctgacttcgagatttcctgaggaaggtgggatggagcctgagtgccatcaaatcagtctccccaaaggcctgttcatggccaaccttcccccatctcccactggactgtccttctcactcctgcccagcccaggccagtccagccttccctccctgggcagctcagatgctgggatgcttgcagcattgagacagcaacatcaggccctccacttatcctgggctggaacacacagggccttcttctgagtttggagatcttctgggggaggtgcccctgtctcctcccaaagagcaggggctttgggttccttaggggccagtacctctttggtcactaattaagtgtgtgaccttgggcagataactcaatcttttagagattttgtttgttttgagacggagtctagcttttgttgcccaagttggagtgcaatagcaggacctcggcttaccacaacctccgcctcctggttcaagcgattctcatgcctcagtctcccgagtaggtgggattacaggtgcccgccactacatccagctaattttttgtatttttagtagagagaggtttcaccatgttggccaggctggtctggaactcctgacctcaggtgatccacctgcctcaccctcccaaagtgctgggattacaggcatgagccaccgtgtctggcctatagccttggtttcttcatctgaaaaatagtcatcgtgcctaccccactgctagaatgaatgagatagtgtagagtggcacttagcccagacaagacaggaagacaagacaggaaaatttattttaaaaaaaaaagtgtttattttggtagggatgggggtctcactttgttggcccagcctcattttgaactcctgacctcaagccatcttcctgacttggcctccccgataaagtgctgggattacaggcacacgccaccacgtctagtcaaggaaagtccattatttttcttttttttttttttgagacggagtctcgctctgtcgcccaggctggagtgcagtggtgcaatctcggctcactgcaagctccgcctcccgggttcacgccattctcctgcctcagcctcccaagtagctggtactacaggcgcctgccaccacgcccggctaaatttttatatttttagtacagacggggtttcaccgtgttagtcaggatggtcttgatctcctgacctcatgatctgaccgcctcagcctcccagagtgctgggattacaggcgtgagccaccgtgcccggccattatttttctttccctcctttcttctgggaaatttgtcccttcccagtgctttctctgaggcagagagaagaaaaccgcttccttctctcactttccttggccatttggagcctggtattctgtggggtaaccaacccagaagtggtgattcctggacaaagagatgctaactagatacagagaagaattcccaggggaacccgtagttctggcaaccgaggaaagccagggaagttggaggactgtggggctcatctagtctggacatcagaagcctgaggtggggcaagcatggcggaggcagggggatggatgccatgacctctcgatgtccttcctggcctgcagcctttgtgtttcagagcggtctctcctgaactaagtctgagtcattgctcttagtactgacaactcccactgcagtggatcagagacgaggcggaagcagcctggccagcctctcctgggaaggaaggagcattgccccatctcagattcggagggtagaaacgaggggcaggcagagcgagggccaggtgctgccggggggatgaatggcagccacactctggagggctccctcagaagtggcaatagaactactggggtgcctcttgttgggaaagtgggcagtgggctcttgggagccctgggacagggatgacttcaaatctgcatgcagcacaatgtctagcacatgaagagagaccagtcctcagcccagctctgccttttgcttcctgttttgtgaccttgggcagagagctgtctatctctaaaggtacttgagtttccttcttgtcagactggcagaattggattagattagtttgaaatgaggagttggattaaaatgagggcaataatgatacatctcttagcactcttttgaggattacatgagttaatgtacgtaaagagatggacaggttgggtgaggtggctcatgcctgtaatcccagcacttggggaggccaaggcgggtggatcacctgaggtcaggagtttgagaccagcctggccaacgtggcaaaaccccatctctactaaaaatacaaaaaattagccagatggggtggtgggcacctgtaatcccagctattcgggaggctgaggcaggagaattgcttgaacctgggaggcggagattgcagagagccgagactgcaccactgtactccaacctggg

SEQ ID NO: 420 - DNA, 8060 bp, Homo sapiens
ctgcactccagcctgagtgacagagtgagaccctatttcaaaaacaacaacaatgacaaaaaaaaaaaaagtttggagatggagtggtaaccaacttggcagagtggaggcagctggcacttaagtgcttaaagataatagaaacgaaaagttaacagttcactctacttatccccaaaaaagttcaggacatggagggaccagatagctcagatggaaggaaaaaggcatagagctgagaacagagaaattatttaggagtctgtatataaagcagttaagcttacaaatcccctccccaaccttttttagctgggcaccaactcccatagcacagcagagggtttactctttggggaaactgaatctgagaagcaccaactcagggacaccaggcacagctgaaggtggagtgagcactgagctgaaaacaagggactgggtaaaaacatatgtaccaagcggtggctccacaaccgtctcccctgaccctgctgctgtaacctctatagcaggggccatgcagatatcccccagacagattggagaattctctgtagaaaccagacggtcccttcagtgagatttacagattctgatatttgggtgtacccagtaaaatatcctgcttgcttcagtcgccacagagtgaagcccatagatcaacaagccccaaattgtgcttccaattgcctctgcttaatgcctcattcttaaatatggacagccgaagatcaaacatttgaggaaaacttccaacaatacacacacaaaaaaaatggagcggggggaagcaggggaggggaactcaggggaaacaataagaaaagcagaagaaaacttaaaaactggaaaaatccttggagagctaagagaacagactcatgaaacaagaacagaaatactatatataaaaaaagaagcacggccgggctcggtggctcacgcctgtaatcccagcactttgggaggccaagatgggtggatcacctgaggtcaggagttcaaaaccagcctgaccaacatggtggaaccccgtttctactaaaaatacaaaaaattagccgggtgtggtgatgcattcctgtaatcccagctcatgcagtgagcacaggaggctaagtcaggagaattgcttgaaccggggaggcggaggttgcagtgagccaagatcacgccattacactccagcctgggtgacagagcaagactccagactccatctcaaaaaaaaaaaaaaaagcaatcaatgaacaagagagttaaaatgtaaaatttcaataagaaagaaagatacagttaataaagttgaaagtggatctcatgaaaatagagatgagattggtggttactggaggccaggaagggtggaggaaataaagacatgttaatgagtagaaatgtacagttagatggaagaaatgggacccagtgttctatagatcagtagggtgactgtagttaacaataatctattgtacatttcaaaatcactagaagagaatgattcgaatgttcctggcataaagaaaagataaatatttaagatgatggatatcccaattgccctgatttgatctttacacattatatgaatgtatcaaaatattacaggtacccccaaaatacgtacatctactatacatcaattgttttaaagttaatgaaattgcccagagaatacaataaaaagagacgggcaaaaggagaaaaaaagataacagctataattcaaggtctaacatcctctagtaaggccagagaaaatggggtgaggatacaggttgagttagggagtggtagcaaacaggtaatttacatagaaaaaaacactatctatagaattaaaagaaaagaacaaaaagacttataaatagcaatacttggaagttagaagatagtgagggaattagccaggcatggtggcacatgtctgtaatcccagctacttgggaggctgagacaggagaatcgcttgagcctgggaggcagaggttgcagtgagccgagattgcgccactgcacactccaacctgggcaacagagcaagactgtctcaaaaaaaaaaaagaaaaaagaaaaagaaagaaagaaagaaagaaaagaaaagaaaagaaaaggaaataatgaaggacataccaacaaacacaatcaccattatggcacgtggcttcttatgttttttctcacttctttcttatctcctctcttgcttttgtcacttgggagcccttcattcttcaggctcctctttcagaaattttgcccacttcagtctgcaccttcttccacaactctcaaaatctaccctttatcctgctgcaattctccatctcatagaccccatttagtgtcagactaaatccttctagcccatcctccatccttttctcaaacatttccctatgagctcccagtcacaccttttctcccaatatccaagtgtcctctgtcaacacattaccaagtcttctctttctcctccatatgttcccacttccctctgaaccagagactcctctttgcttcctttgatcctggcctccgccttcagccccagaagctcttttcctcacttccactctcttttattttaggctcagactctctcctttcctttctcaactttaccccttcagtgtcaataatgttctgtctggctctaatttctcctctgactttcagtacttctcctgtctgcctctttccttctttggtgtcaatccttcatctgcctcattcactggtaccttcacctataatatcttttttttccatagaaacagattcatcagtgatatctttcacttcactcaagatgcccccctcaactcccactcctttctcagtcccttgtagttcctcactccctttgacactttcaaaaggaatttccatctcatcatgagtaaatgccatcactctttcatcgccagtaacttctaccactttttcaatgttcttctcatttatgctccccattcttgaaccctccaatttctccccgctggtccctaacttctcctcactagatctcagcttctccgcacttgaccccagcttctctccactcaacctcagcttctctctgcttgatctcagcttctctccactggttcccagcttctctctgcttgatctcagcttctctccactcaacctcagcttctcatcacttgttcccagcttctctccactcaatctcagcttctctctgcttgatcttagcttctctccactcaacctcagcttctctctgcttgatcttagcttctctccactcaacctcagcttctcatcactggttcccagcttctctccactcaacctcagcttctctctgcttgatctcagcttctctccactcaacctcagcttctctccactcaacctcagcttctcatcactggttcccagcttctctccactcaacctcagcttctctctgattgatctcagcatctctccactcaacctcagcttctcatcactggttcccagcttctctccactagttcccagcttctctccactccatctcagcttctctctacttgatctcaaattctctccacttgatctcagctttctgccactggacctcagcttcactccactggacccctgcttctctcccctgcacaccagcttctcactagtagacctcagcttctctacacttgatctcatcttgtctacactagacctcaaccccttctcatcctgtcccagtttatatccattggatctcaagtcctctccactggtccctaccttctccccagcagacctcaacctctcttcaaacccagaccccttcataggccctgctgtcatccctgcactcttagatttagcctttatttcgtgtttgacctcttgctttccccaaataccccttgggctgtctttccccaaatctgctgaagcttgtgatgcacttgctccacggtatagcagcttcacatccatcctttcctgactcgggcctgacttccctttcaagaccgtcttttccacatcttccagtctccagtactcagactccagcttcggctttcgagtgtttctagtcaggagctccactctcttcccaattaccatgagcccgttccaaggtccccaggttttctctcgcagcatcggcacccccttgcagccccgctccagtggcgaccgttcgcggaccccggcctcgcttggggcgccctggccgcgggacttgtggagctccctagtcctcctaggctgcttaccccgccgctccctcccgtccaagagcggaaacctaaacagaccccccttctccacagacattgtcccctgccctcgcccctggtccaccacccacatccccaccactgcttcccattccctgtccccaccctgccaccctcaccctcttccccttccccttccccttccccactgcctggtgggcgccaaactgggcgagtgcgcacgcgcaggccgcacgtggccgttggaaggaggggcccggaacggcggcacggggttgttgtgggggtcagtcccccggggactggagggagacgcggcacgcggcctctgcgaccctatgaactctgaccccagctcccacactgtcgcctatcaccggcccactctccgtgccgcgtgtcccttaaaagctggggcctgggacaggaacgacagacaatgcagccaatggcgtcacgcgcggtgccccgctacccaatcgaaaggcgtggctgagggaaacgcggtgggaaccgcccccgactccaggcgactccttggccgggcgggggagagcgtccccgtcagctgagagcatcctcactcggtcagttcctcgggcgagttacggggacgacctgcgggagcacgcgggcagtggccggacgctgaagcccaggagagcgatggagacgtatgcggaggttgggaaggagggcaaggtagagaaaggatgaagacccccaccccagcctcccctcactccatgaaagcccgtgatgcccaatcatgcggtggtgtgtgtgtgtctgtgtgtgtgtggtctgcctctgtgtgtttctgtgtgtgtctgtgtgtgtatagtctgcatgtgtctgtttctctgtgtgtctgtgtgtatgtcgatgtgcctgcatatgtctgtgtgtgtgtgtatctgtgtatgtctgtatttgtgtctctgtgtgtctgtgtgtctgtgtgtgtctcagtgtgtgtctgtgtctttgtgtgtctctgtgtatctgtgtgtgtgtctgtgtgtctccgtgtctctgtgtgtgtgtgtatggcctgtgtgtgtctgtgtgtgtgcacgtatgcgtccatgtgggtgtttgtgcgtgcatgtctgtgtctgtctctgtgtgtgtctgtgcatgtctgtgtgtgtgtgtctgtgtgtctgtgtctgtgtatggtctgcgtgtgtctttgtgtctgtgtctgtctgtgtgtatggtctgcatgtgtgcatgtatgcatctgtgtgtgtctctgtgtgtatctgtgtgtgcacgcatgtgcctgtgtgtgtctgcgcaggtctgtgtctctttgtgtctgagtgtgtgtctgtctctgtgtctatgtatggtctgcgtgcatctttatgtctgtgtgtgtgtgtctctgtgtgtgtgtatggtctgcgtgtgtctgtgtgtgtgtgtctgtgtatttctgggtctgtgtgtgtgtttgcatgtgtctgtgtgtgtctgtatccgtgtgtctttgtatatctgtgtgtgtctatgtcagtgtgtctgtgtgtgcatctgtgtgtgtctgtgtgcctgtgtatgatctgtgtatgtcgttgtgtgtgtctgtgtgtgtgtttctctgtgcctgtgtgtttgtgtgtgtctgtgtatctgtgtgtgtttctatgtgtgtctgtgtgtgcgtgtgtctgtgtttgtctcgtgtgtctgtgtgtgtgtatgtgcccatgtgtctctgtgtgtatgtgtgtgtctgcgcaagtgagagaaaggagacttgagcaagggagtggggagcctctgtggcacctgtgtgcggactgatgaggatgccaagggaggcagggttttgcctttgtccttacagatggaaagggacccgtcactgtcactcttaccctccccaagaccaactcaggctgtcttgatgggggtaggtgggtagggggtgggaggtgagggcggggaggagggcaggatgttagggattgagcagaggctggcatcctcttctcctttcccaaggcgagagaatcctgttcagccctaatggcttcacttgtgttctgagttcatgtaatgataagaccatttcttccttttgacttccttcagcaaagagttgtcgagcatccacgttgtgccaaggatggttagagcatggagaggtgcacccttttgggagatggaggcatatgcatagtgggccgtggctgaggatgaggatggagcagctgtggtccacctttgaggcccatctccctcaagcagctaccaagcagtgtaggtcagagtagagatactaaggcaggaggaaagaggctggggactaggggacctgctgcaccagttagccagactgcatgtgtttggggtctggggcaaggggagagcctgccttgggagtgtcagagaagccaagaaatgaggagcggggttcaagtggtttagaggggcaagaggggctgagagacacaaagcatggaacagaatggtctgcttcaatgtttatctatgtatgttcatcttcatggttaaaggagttaacatatataaaatgcttagggcatatacatgaaatggttagagtggtgcctagcatattgtaagggccaacataagggttagctattatattattattattgttatattatttttgctgtatgttctgaggatgtgctgagctattgaacagatggatgcaccccccagcctttgcaggagccatactctgaaagttcactaccagtacttatcctctaggttaggtgttgccttctctaagatcttcctttaaatatagagacattaaaagaatatataagcaaaaatataatagaggagaaaatgaaataatataaaatactggccaggcgtggtggctcaagcctgtaatcgcagcactctgggaggccaaagcaggcaaatcacttgaggtcaggaattcaagactagcctggccaacatggtgaaaccccatctctactaaaaatacaaaaaattggccagacgtggtggtgcgcacctgtaatcccaactacttgggagactgagacaggagaatagcttgaacccaggaggcaaaggttgcagtgagccaagatcgcaccattgaactctagcctgggcaacagagcgagaatctgtctcaaaaataaataaataaacccagaggattataaataattatactataaagacacatgcacacgtgtttgttgcagcactatttacaatagcaaagacttggaaccaacccaaatgcccatcaatgatagactggatagagaaaatgtggcacatatacactatggaatattatgtagccataaaaaagaatatcatgtcctttccagggacctggatgaagctggaagccatcattctcagcaaactaatacaggaacataaaaccaaacaccacacgttcttactcataagtgggagttgaacaatgagaacacatggacacagggaggggaacaatacacactgtggcctgtggggggctggggggtaaggggagggacagcattaggacaaatacctaatgcatgtggggcttaaaacctagatgacgggttgataggtgcagcaaaccagtatggcacatgtatacctgtgtaacaaacctgcacattctgtaaatgtatcccagaacttaaagtaaaatttaaaaattaaaataaacaaataaaagaaataatataaaatactatttaaataatccaaaagaggacaagaaagaaagaatacaggaataaaaacagatgggacaaagagaaagcaaaaagcaagatgacaagttggtagcctgctacatca

SEQ ID NO: 421 - DNA, 8060 bp, Homo sapiens
ggcccaggcacattagtcctgtcctgctgaagccatgtggtcttcggggactcatgcagttccgtttcaatgtaaactgtcaaggctttcttcaggaaacaggcatgaagatgctgtgtaactggccggagggacctaagcacgagtttgagatgggacttgcccctggcacaggaagtagcttagttaggctggagtgggagcccagagggtcagagcaggaactgctgggagatgctccgacctccttcctggagctcagagggaaggagaatctgtggagagggcctaggctcaccggagctggggacatctgctcaggtccccccaccaaccccagccccttcagagcaatgggggccaaaggcatcaagtcattcatgctgtcctttgatctgctgacctcctctatggcccctgggagctgggccttaaaggagtctggaaagggtaggctcaggattagcaacccaaagacctgcagctcaaaccctcaaaccgaggcggggcctgaggtgggcccaggtctgctgtgtgctccgctctatgggttttctccctcagcccctcctcctcagcctctccctgcaacctggatttcctgttgccattttagagggcaccctcaccccgactcctctcgcatggccagcaccacccaggctgcactggcaatgtgagccccccagaacaccccaagtcactggcttgaccctctcctctgagcccagccctggctgcaaacaaccagcccctaccaggggggcttggcgagaagttagggagatgccacaggatttaaattagtcaaattcagtgacccaggggccttctatttttggaaatttcctccagagacaaaaatctctgcttccttccagaccttgggcagcctcccagcttccctggaccctgaagggaagggacaggcctggccaccctgggctcagcttctggcccaggtctccttctgacacaaggtgaaatcctttccagcctcttcgaagcttcttgtgtcataaagagaaacaaaccttgggagggaagagaggctcctttgagcccctttcattgttttgggggaataacaaccctccacagaaatgaaagccttctctggagtctttttctctttgctacaaacattttattttgttttattttattccagattcacgcagggccctctgcagactgttggcagaaaaaaggtagccaccaaacacatgcataagctggacttttcccagaatgctgcagcagaactaccctccagatagacactagcctgcgggccacagtgctacgtgagtcttgcaaagaggagatctttatggcgaggctgagagcactgcctgcatgctttaccagagcccagcctccagcctccacggaaaatgtgttttggaatcaacactctttgcaaaggctccacactgctttctggtagcattggcctgggcgcccaggcactcctttagaacccacctgttccccccacccaccctagtgggaggaggagagggttacactgacagataccggcagctctgcaacccgggaacaacgcagacaacatacaactcgacagagtcacagaaggtggcgtccatcgcgcctggatggtgactactgccctgcgggctgctgggtgggtgaaacacacagggaagaagcacaaatacacacacagatgtggctcagggacatttgaatgcttcagtgtgtgaattttttagcgcattctgactcgaaattatggctgaatagtggcgcactaatgtccaagtccatgttcgataatggcaggaagtctgcactaattggtctatttagtagttgctgaggtggcaaaagctgcagctgctggtggctgaaagagagagagagagagagagacctcctcttaggccacttcccagagctgtggcagtgggggagggggaattccccaggatggtgtttgtggtcaagttcacctctggcaaccctgcctaagctcttctcacaggtgcacgcattcaagtcctgaagagccctccccgcccccaacagtgttcatgtcccgggctgggggcccgcctgggaggggctctatatgccggtgggacctggctgctttgcctcgcattctccccactcttccccttcccagggcagcttttctccccgcaccccatctctctcccctttgctttctaactgggttgggaagctaatctgccaagagcccgctgcttagccggtgcggtggcatgtgcctgtggtcccagctacttgggaggctggaacaggagaatcgcctgagcccaggggtagaggtgaggctgcagtgagctaggattgcaccatggcgctccagcctgggccacagagcaagactgtctgaaaaaaagaacctgctgcccacctcaccatttgaactgggaatattttaccagagagaatgtggacatggagaagccaccgtcacacacagagtaagggtgtgtggggtgggggcagatttaagatggactctggacagttcccgagccactagagtgcccatccctgccaggaggccccagatgctcaggggtttcagcggccttctgcagcctcagccagtgcttacaccacacctgggagcagcatgggccgccctctgcctcaccgaggggcaaaccggctgaggacccaggcacgaagagtgtcaccagctctgaccacaagccccgtagaccagggctgcgtccataatcggggttgatggcattagttattatattataacctccttgttgcgtgattctagtaatttattttcccacttggcctttgactgggctgggctcctcccagtggaacaacagggggtgtcgtgtttgcagcagaaacgcacactgggatcctttcttgcaacagctgggccggctgggtcttttctcttgtcttctgtacacaggcccctctccgctgtttctgcagagaccgaggtgggagggagaaagaccctccagccctctgctcccaccctccccgcagtctccggggccctgtgctgcaggcaagataatttggctaatgaactcgttaaagggcccctggtgacccgccccggcttcccctcggcccatctgggaaattccattgaaaggctggagaaggttcctcagccccgccgccttctgtcgctgctagaggcgcgaacccggtgactctgggccccttacattaaaataattacccggcggaacaggtggcccactcccggcgcctgggtgcatctgggcccccggagccgcagcccgggaggaggggagcggcacgcccaggggagggaaggtcaggcccgctgagccgggagccgggagggtagagaggggctttcctagggacagacggtcccggggcacccaggcctccgcggccgagcgggctgaggcctaagcagggaggccgtcgccttcaggcacaggtaagcgcagcccgcgcaccgcttgggacgcacctggccacctgcgctgccacccaagcttggggtatgcgggtgcccgagcagaaccccgaactcgcaccgggctccgaggttggagcaactcctaacactgggctcggagctaggggcttgctggaggggcgcttgccgcgccggccctcggggctcacagccgggcacgccggactgcggcgagcgcgtgggcgagcgtgtcaggagcgtgcgccctgggtgcgcgcgtgcgagagcgcacgtgtagggtggcttccagtcctcccttcccgcctgagaagcgtccacgcggagttccaggccgggcgctggggaaggaggtcccggggacgctgctgaaaagagagcggccagcccaggcgcggggccaagcctattgccaaaaacatattaccctgcgacattctgtaaatgagataatgatccataaacccggatgatagatgtggcgtgcctgcgatgtcttctctaaatgagctgctcgcatcgactgctaataatggtgagtttatggaagcgatttcagcgcaaactgcgagagggtcttcttactctaatcagcctgcctgagctaatggacgagggggtcaggctgagagttattgacacgcccgtgcccttaacctgtttcccaataaagctgattagtttttgtcaattcatcagctaaccactcttgctggaactgcatcaaagccttatttgctcaggggaaatcaacaagtcacagatcagctccattaaggggcccggcccggcaaggacagtcctggagccgagggacgccccgacggacctcgggcctcccccgaggttcgcagaggggctgacagcgtggccccccttaactccgagcaccacgacccggatgcacataactgtgtccggaaacttctctttctctgcaggtggagcagcgcctgtgcggctccgcgctatggctccaaggctccggccctggcgtctgggctcggtcggggacagtttccacgcgaggcggagcctagctggaggtcacagggcggtggagagcgagggcatgagggagggagctgggaaccgcgcagtgtccgcggccacgaatctctcctacgcgtccccatgaggcgacctaaggggaagagtgcaggaccctaggacccccccaccccgggcagcgcgggcctgagcttgggggacaggcagaaggggatcaaacccgcacccagcgcagactcctacttgctcagtgacttcgcaagctcgtgggagggagctgggcgcgcccgagggcacctgggctgaggttccagtagctggctctacctgcgcttcaggtgagcggctgcaggaagggccctcccaggtatccctcggctcccgctggcaggagtgagcccatcggccgccgccggcggaggtgaccccaacgccctggctcaggggcggggaaggaaaatgtgcgttgtccctttaagcccccggccactgccacctcccggccccatcccccttcaatttaatttcattaaaacagagcatgaatatttctattaaacctaaaatgaaatatgaagccatttagactctgcctgcaccaatcacccagatttatgacttttattcatcacatcaagagcttggaaaaatgaattttcttcacccaggaaggaaataaaacctcaggcttggtcatttccagaaagctgttaatttgaccatgtggtaattactttcacaattaactaaaatacaaatcaacttgacaaattgggctagtttatatattaattagcccccttaaatttattcattatgaaaagacaatttaaggggacctgcggtgtctgttttattgcaataaattattgttaggaaatgggtctaataaaatatcttaatatttaaggatattgtatacgcggggggtatgctttattgacaatttcattttccaattagtaattttgttgtaatatatctgcgaaccggggactcccgggcagggaggcaggattctcccggctggggcggtctgagtagctgggtctgagcctcgggctgagaagagtaaattctgcagaaagggccgcgtccgatcggcgcaaacgttcggttcgtagcaggagcttctccaggcggccaccgaacccaggtccaggactcggcactcctggagccctcctccccacgcagaccgcgggggctgatttaatagaatgtcgatagaatcattcgatgccttttagcttgtgatctttataaatgtccctctattaaattagaaaatgattctcttctcgtttaattgtattctttcgtttcttatttccaattaattagtcctatcgacgttgcaatattttaagtgacttgagtccgtttccagttagaatatatgggtcagcacatgcaattttatacccgacaggactatataatgtgggttttaactactcgttcctcatctgtcttaaacatctggccaggatgcgccacccggcctcctcgcagatccttcctggggcaggtgggcaccacgcgggaccctcccgggggctcccgcaggcgcctcttgctgcccggggccaagggtcgggcagcccatagcgtccggcctgggcctttacttggaattctttctgttgaagacttggtcccagcccagtggttctgggataagaagaccccgcagaggggcccagcgccgcgttcctacgagacacctgagctgcactgtgtttccacgggctaggagagcggtgactccccagcctccccgtaggcctcgctcgcaccgcagagggatggctggcccgtgccgctccgcggttcccctccccgggcggatccgcgcagggagagcccggcgggcctgggcttgggcctgggcctggttcgggggtgcaggccaagaggggcgccaggccgggctcccctacccgagcacgtcagttccaccccctcccttcttgctgccctacaaaactttaaaatcactttttaaaagaccgtgtctcctctcggcagcccccctcgacctcttcgcaggcgcctgagcagccccgcaccgaggggcgcacctttgcttttgcgagctgcgcggcgcggacacccgggctgcgctcagcccccacccccacaggcttcccagccgtctgcccgagttcggcttcaacgggagcggggctccacttttccttaattgacgaagtcacggattcctcccgggcggatttatggggctgcgcgttgtgccggcgcccgctgcttcgcatctgcgcgcccgcccggtgccgggccccgccctccgcctcagccccaagctcggcccgcgggcccggccacaggtgccccggcggccccgcctggcccgagggaagagggcagctgggaggggccccggccgccgcccgttcctgctgcgggtgagcaccaggtccccgcgggccttgcgcggtgccccccagctcagcgtggcgctcggcggcccaaggtctggggcgtggagggcgtcagcacctggccgactcgccggttcccataggctgcctcgccccgcgttttcctagcgggggatggcggctccccgtgtccgcatcgctgccgggccctgccaccccaaccccggccgcagtggctggaagccgtggccttttccgggctccgagagccggcggggcggttttcctccgggtttcctcccgccggggtcttgggagcccctcagcctcgccctccctgcagggagaaacctgtctactgcgtgaatttctaagcagctgatccttcaggcccaagactcctagagtggaaagggttccccggaatagtaagcgcgccgtcaccttgggtttcttcttcccagagcaaggagacccccgttttcctcatgacccgcgtcctaaaaggtggggaggtgagattcactgggaatcgtgaacctgcccccggcttctcccggggcagcctcccccggtcaggggaggagggagcccttcccttcaaccccgaaaggttccttcctggtccctagctttgctctttgcaggcagggatggggctggcacgccttgcggagaattttaccgttttaaatatggacctagaggccaggtcggaaaggggaaagaagctgcgccttgccgagggtcctgtggccggagcagggcctgactcctgactcccatccagcgccccttctagaaattgtccctctggggagaatgcctgctgttacacaatggcttttttttgaggggagaggaggatttcaggtcaactgaagctagcagccattccttcagggccgctggctaagatggaaggggagagaaggacgctgtggtctagcaggagaaggtcagagactcccagaaatctctaacactgcaaccgcaggctggccattcccagcaggatctcaacagctgaccatcttcctgtgtgcacccgagtccatctgggggggtaaattcaacatttgctcatcttctcttactgaatgttagcttctattgtctacgtacgggttaaaggggaaaaggagtccttggcaattaaagagcactggatggctgaaatctgc

SEQ ID NO: 422 - DNA, 8060 bp, Homo sapiens
tgaatcagcccccttcttgttgacaagtgacttcaaagagtctctgcaaagaaaccgcggatggagataaccctaatcatgaaagtacaaacaagcaacaggaaaagtgtgggacagacttgtccttactcttagtttagctgcattaccacattggaaagagcaatggaaaggagtccgacacatgaaacaactgtttcctgtgtatttgagttcctgaaataatgagaaataaacacaaactcaaaatacacaataataacgagaaacaaatacaaactcaaactcaaatacaatcgtatttgagttcctgaaataataatgagaaacaatttgaaaggtggatttccacccactaccattggtgattgaaattcattctgggcgtacactggccctgagacatcagctaacggccaccatacttgtatatacatgtacatatctatgcatatgtatatgctgggggtgccaacggcatgcttcttgagaagattgtgcaatcaaaaagttagatgagtgctgctctagatcctcagaccaagctagatactaggggatgctagtcctggtttggggtttttgggtctaatcagataatttgttccagatttagggacaaggaaaactagagggggagtttgccttccataaaacttttttgaggctccactgacacatttgaagattaataggaagaaacctaaaactcataaaattctttccctggctcgcatcgtcctaacttggtgtagtgttgagtcaaacaccaaagcaccaaggtgggtgcccagctagacagagccaggcgggtcccttctcccacagcctggaatctcagtctctgtttctttctttcccatctttctctctctctgtttctacccacctccctctctctctctctatctctttctctctctctcacacacacacactctgtctctcacaacacacaccacacatatacacactctctctctcacacacacacatacacacacacaactgacaataagaaacaaaaaggtagcatccagcacaagagcttgtcagttctcttgaacatcagacagacctagatcttcagttcccgcctctacccctcactgactctgagacctggagcgtgtcacatccattctcagagcttcagaatccttagttggaaaaatgggcatgcctacaactcaacatacagtgacaaataatccagtttaaaaacggacagaggattcgaatagacatttctcgaaagaagacacagaaatagtcaatagcacatagaaagatgcttcacatcactgggtgcggtggctcatgtctgtaatcccagcactttgggaggctgaggcgggcggatcacctgaggtcgggagttcgagaccaggctggccaacatggagaaaccccatctcttctaaaaatacaaaattagctgggcatggtggcaggtgcctgtaatcccagctactcgggaggctgaggcaggagaatcacttgaacccaggaggcagaggttgtggtgagctgagatcgcaccattgcactccagcctgggcaacaagactgaaactccgtctcaaaaaaaaaaaaaaaaaagatgctccacatcattagtcattagggaagtgcaaatcaaaaccaccatgggataccccttcacacccactagggtggcttaccataagacatacagacactaacaagtattggtgagggtacgaagaaactggagccctcatacattgctggtcagattgtaaaatggtggtcactttggaaaacagtttgtcagctcctcaaaaggttaaaaaagatttactacatgacccagcaattccaatccctagtatattcgcaagagaattgacaacctatatccgaacaaagacttgtaatgaatgtttatagcagcattacacataacagccaaaaatggaaaagctggaattacaggtgcgcatcaccatgcctggctaatttttgtatttttagtagagacggggttttaccatgttggccaggctggtctcgaactcctgacctcaaagtgatccacccgcctcagcctcccaaagtaatgggattacataggtgagccatggcgcctggccctgaattatacacttttaaagggtgaattttatagtagtgaattacatctcagtaaatctgttatttaaaaaaaaaaaaaagaaagaaagaaaaaggaaagactccacccacaggattgttgtgaaagtgaaataaggcagggagcagggcaggcccagcatggtccctgacgtgcagccagcacttgagatctctctctctctgatccttttcacaaggaggatttcccagcaaaagtaacctggtgctttagggctacactagcttgagttcactccccaccactcccactaacacacactcctgactccttagttagggctctgaactcttctgggcagtttcttaacaaaacagaagaaaataataagcacaagaccataatcattctcattccccttaaaaggaaactaggttggcttgaggcctaaaagccagggtgctctgagcagaggtggctctaggacaaggatgacagcctacgggggtgggtggggggagctctgagaggtctgccaagcccccctccccttgggccacaccacctgtgcctgagcccccaacaggcagcagggccccctccccatggcccagctctctggcatatcctccccgggggtgcctttgagctggaggcagaggacggctgacttcttccttccaagtctcccaaacctggctggcagcccagggtggcttcctccaggaagggcagagagaggggcagctgcctgtagtcactgatggtggtgcagaggctgagacatttgcgggaacacccctcccctcctaagctgttaggttccataacagtgagggtgtgaggtgccttcagagatctagctggacccttcattttacaagtagggaaactgaggctcagaaaggtcaagggtttttctgaaagtcttgcagcaagttggtgacagaattgggagctggtcacctaccatggccaagtataggcgggtggaaacctcaacacaacccaggaaggtgaatatttgtcatcctcccctgaagtagagacaggttctcacacagctaggaagatgcagagctgggactcaaacccaggtccaccaaggaaccacacaatatcaagcctattgaggacactctttctcccgatttccttaaaagctgacactccaccccactgctcacccagccccatgtcccattacctgtggtccttcagcttgtctgggcagcaaggggagctctgtgtagactatgtggatgctgggctggtcaggggaaggagaggacaggctgcacctgtgacagcaaggagggcgggactaccgtgacgttgtccctgggccccactcgctcactgggatggcattccttcctgctggtgctatcagccccaggccttcctgtctgacttgactcttccctacaacactgcggaggggcaggtggggcagctacatgcctggtcctgcctcagggccacagccatgccttcagactccaggagacagtgaaatgggggcagctgtgccacccttggctgtaccaagctctgggaaggaaggaggggacgtgtcccaggtaccccctccacccacattggtgaggctgactcaggccccagccacgtgtcccaacctgccctgcgcgtcccagaggggaaggaagatattccaatgctcccaggaggctgaggttgggcagggagcaggagagagggcctgggggctcaggagactggcagtgcccactcctagggaggaaactgggttacagctagaagtacttttggagagcacccactcgccttgtgcaagtgggaaaacacaggtccctagagaggtgagaggagcagtgtcagacctcacacagccgagggcagggccccagctcagcttgcctccacctctcacctctcacttatccagcactgtggcagcaggacaggaaacaagtcctaccacgggagcccccagccttggagggaaacaggcaaggcccaggagctgtgggctccccaggaggacttcctgaagaggggtcttccataccctaagctcagcccccagatcttgacactttgctttctcacactctgtatctgacccatctggaaaatcctgttggtcctgccttcagtatagcctgaattcagccccttctctccactcctcaactgtcaccttgatccagccagtgtcaacactgggctccctgctccccgcctcgcccctggctattctcatcagccaggcagccagggggtcctgttcaaacccaaagcagctcatgtccctccccgctcagcagctgccacactcccactgcactcagggtaaaacccaaggtcttacaagcccctgcgagatcttccccacacctctggccctctctgaccttggttcccatgacttcctccctcactctgctccagtaacactggaacatgttccagttcccctgggtgggctccctcctcagggcctttgccctggctgttccctctgcctggagtgctctccccctagaaagccacctggccccccgctcacttcagctctctcctcacaagtcacctactccatgaagccttatctgaccatcctgcttaaagtagtaaccccacaccagctttccctctgcctgcttcactgctcaccatctgctgtgctgcatattttcttgttatgtctattttctcattacgtattgctttgctacaggacctaggatcatgtctgacagtaggtgctcactaatttttttttttttttgagtcagggtctcgctctgttgcccaagctggagtgcagtggcacgatcatcactcactgcaaactcaaactcctgggctcaagccatcctctcacctcagcctgctgaggagctgggactacaggcatgcacccccacgcctggctgatttttatattttttgtagagacaagatcttgctatgttaggctggtcttgaactcctagcctcaagcgatcctccggccttggccccctaaagctctggattataggcgtaagccactgcatctggccctcaatacatttgttgaatgaatgagtgacctgaaaggttagcccaagaagtgttccaaggatattccatgcagagggagccatgtgtgagggcttagaggtgaggagcactattgtgtggaggatctgcaaataatcctgaacagccagagagtgggggccttggggatggagaggggagaggaggaagcaagagaggcagggcctcagcagccaggcatcctgagagggatggggagccacctgagagggacatgaccaaacctgtgtttaagataagaattttgcctgggagccgtggctcacgcctataatcccagcactttgggaggctgaggcaggtgaatcacttgagtccaggagttcaagaccggcctggccaacatggtgaaactccatctctactgaaaatacaaaaaattagctgggtgtggtggtgcatgccagtggtcccagctactcgggaggctgaggtgggaggatcacttgagcctgggaggtggaggtttcagtgagcagagatgacaccactgcactccaaccatggcaacagagtgagatctcatctcaaaaaaaaaagaaaaagaaaagaaaaaagataaggatttggctgctgcattgtggactggtggagaagctgtgaggatccagcatctgggtgagcatgagccatgcaggggagatggggactagggacagggtcgtgggaagtttacagctctgctgtccgaacagtagccaccagccacatgcggttatggagcccttgacacatggctggtcaggattgaaatgtgctgtgagtgtaaaataacactagatttaaagacttggtatgaaaaatgtatgtatatatatacaacatatatatgtataatagatcattaataatttttgtattgattatctattaaaatgatatttggatatattattattattttgtagagacaggatcttgttctcttgcccaggctggagtacagtggtacaatcatagctcatggtaaccttgaaatgggctcgagtgatcctcctacctcagcctccccagtagctgggactacaggtgtgcaccaccatgcccggttaacttttactttttaaaattttgtgtagagaaagggtctgctgtgttgcccaggctggtcttgaactcctgggctcaagtgattctccagccctgggttcccaaagtgctgggatttataggcatgagccaaagcacctggtctggatatattattaaaattagtgtcacctgcttcgttttactatttttaacatagttactgaaaatttttttaaattttaagttttcaggagctacagaacttctatattggatggtgctgatttagaggtagaactggcagaggctggagtactgtgagggtgagggggaccccgggtctaattataagtctgtcttctccaattgctcctttctaatgagaccactgtggtccagaggccacaggggagagcctacagagtgagtgttcagttcagcataagcacacacgctcatatcttcaaagtaagatctatctagacatgaaataggctgactgaatagacagtgagttctctgtctctggaggtatgtaagaagaaaattaaggaccaccactaagcagaggaaaggaggtggaactagatattttcaaaatatagtccccggaccagctgctacagcatcccctggaaaccttttagaaatgcaaattctcagaccccatcccgggcctgaatcagaaactccaggagtgggacctagaatctgtatttaaataagccccactggactgggtgatgtttcctgccacttaaaggtttaaatgcagctgggcgcggtggctcgcacctgtaatcccagcactttgggaggctgaggtggatcacgaggtcaggagatggagaccatcctggctaacacagtgaaacccccgtctctactaaaaatacaaaaaattagccgggcgtggtggcgggctcccgtagtcccagctactcgggaggctgaggaaggagaatggcgtgaatccgggaggcggagcttgcagtgagccgagatcgcgccactgcactccagcctgggcgacagagtgagactctgtctcaaaaaaaaaaaaaaaaaaaaaaaggtttaaatgcctggcacatagtaggtgctccaaaaaaactgttcattaccttctgtttgcctcctactcccaagttcaggtacttccctccctgagccttagtttccctctttgcacctcctacagcatctggttgtgtgtgtacctggtacaggatggatgaacctcagggcgtttcctacctctttgctgtgggcagatctcaggggacatgatagagctgccagaagtgtaaggcaggccccagctcaactccatcctgaggtgacctcattgccctgtgtgtagggggtgattcataggacaacctcctactgtcctgtgagcacagctgacagcccgggggagccagctcagcagctgagcatggcatccagcttccctgaattccagaactgcaagcgggggcctgcctgactcagcaggcatgggtgttctggagacaagttagacagctcagcctcagtctccccatccataaaaatggcgggacacagcccctatccatggtgagaatatttatataaagtggtcaaggcagcgcctggcacacgtcagcccctgctataccttggtgttcttgtgatgaggctgtgggatccttcaggctgattggaactccccagtgacttcctaggtctgagaatgatgccctgtaggtgtatggagaaaagaatgtttacctactatgagcacccaggagcctggttctttacatgaggtttatttttatttttatttaatttttttgagacagagtct

SEQ ID NO: 423 - DNA, 8060 bp, Homo sapiens
gcaaaggggtgggcagtgtggatgaataaaccgaagctgagaaagtttgagtcactctatcaaggccatatgactcgtaaatattcaatagttaaagagtaaatagtaaaactcgtaaatagcaaatagacaagcctcactcttgtcaccccaccctgctgctttctgtagcacctaaattgtctttgttacttattttgtagcttaattctagcctgtattatactgacttctaattgttttatttatataaactttacaggcctaatctctcctcccataccaaacgtggcattttatatttctttctttctttctttctttcttttttttttgagacctgagtctttctctgtcaccaggctcgagtgcagtggctccatcttggctcacagcaacctccacctcccaggttcaagcgattcccctgccacagcctcctgagtagctgggattataagcgcataccaccacgcctggctaatttttttgtattttagtacagacagggtttcaccatgttggccaggatggtctccatctcctgacctcgtgatccgaccagctcggtctcccaaagtgctgggattacaggtgtgagccatcacacccagtccattttatatttcctttatgttttccaccctccctagcacagtgacgggctcttggcagtctgaagaagcatgaaccagaactaagcctggtctctcaggatttggtggatgtctaagttgcagggttaagaagttgcagttccttctttcaactcaacctctagcagttggatacagaagcaattgtcgaacctgggcacctaaggggacaggactgtcagtgtcctggaaatcatgttcttctctttggttttcaccacctcttaatggcatatcttctatatttcctttaatgcgaacacaggtaacgagttggttataacccttttctcagggccaggctgccatgccatcgctcctccagagagcaaacacgaaacatgatcctatggcaagaacatacaatgccaggtccctggatttaggtcctgctctgtcattgactgtatattcccataaagaagattaaaactctccacgccttggtttccctgtttatacaggacaagggtagtaacccctgggctctgtgccttgttagtgactcgcaatggtaaagcaggggaatgaactgaaagccttacagaaatgtaaggtcttccgcgtcattagatgctgtgagacaatggaaaccaactcaaatgcctggcgcccttagagccgctgatggaactgaacaaactgctattgctttacactcccaatggaagggtgctggctctcagtgtttgcccttacctctcctcctcttctataaacacaggactccattctgaaaattgtcacagaattgtcaattcctctgacccacagtgttagatgtccagtggaattgacaggacatcatacatttcaattagttccactctccattgctctggagggtgaggtgctacctcaccttcacggggaagacccaatgttccaaggatgtgcagcgcgggagggccccaaaccattcagaccatactcatgttaaggcccatgtaacggtggggtgtgctcaagggcagaaaatagccctgtgtgctttgaaggcaagtgtgtgcaaacatacccaataacagacatgttttgtgtatgatactatattcccatattgtcaatttttcttaaattagtaaacaatgactaacagaagtggtaactgcctatatttgaatttatgcaaacatacatgatttattaaacactttatctggagaacataatggtataaatggaggtttccaggcgactggatttgtgtgtgtgtgtgtgcgcgtctataaaggaagactatgtgctcaatgtggccattcacacagccctaaggcacacaattcacacttccatgttagcatttgtgaataaatatcttaataatagaacacgtgataaaaattttgttaccatacagaccaaagagttttcactaacacctaacatcacactcaatagcagcctgatcaatgtgtaaattttgctgtcactgatggcctaagatctaagctattggaataacatgaaatacacagtaagcatttaatacatattagttgatgatcttgacattcagaacaagaaataagtctcaaaataaagaccgacacacaaccagaatagaaagcaacgtttttttcattattcaaatggcagaaaaaatgtaactcatcaaaactcaggaaatcaacccgacctaagtatttagttagcccctcacatttttaaacctttagtttttttttttaaataaaacatcgctgagtagtaagttataccaaccagaaaaagtcacttgaattcagttctgatcttctttataagatgctgcggatagctgatctaacaagagagcttcatgtgatgctatttgctttattaggtcttggactacaccttaactgaagacgtctatgtaggtgacgaaaactcatggaaggacttgccacaattcaaacatgggcttttggggtttctgagaccaacagaaccaccatatactttgtgggtgtagggattctccctgcatgttgagcctgtcaccctaatgacaaccagctttgcattaactagagtcagccccaaaaatgcatctgttactccagagaaggacaaatccttattattactttataggattttctctactaggggcttccataaagtaaacatgctttcaggaaattaacagagtaattttaagccaaaatccatagcattaaaaacaaataaaccccaaatgatagcaatgtatttggggggaaaaaagcatgtaatcaactgcctgcataatttaaactaccaaagctttgaagctccttaacatcaccatcacctcccttttagacactgtcacccagtagaagaaattcacagccctgctgctctaatgagtatgtttcagtaaacacagaagaaatcattttcacagcccccatgcatttctcagcaagcactcaaatctttcaaacccattccagggggaagtttccatcccaatcttttccctcatatttcatctctaagagcacccctcccccatctgagatccacaagttacaaaaattactgtttcaggtttctcatcattatctgttaaaaaactaaaattacagatgagatagtattctacagtcccaggaactccaactgttcaggaaacgtgagtaacagaagtaacgcggtatacaatgaaaacaaacatcttcctgtctttggagcaactgagaagcaaacaacccgccacgtagcttaccctttcaacgctgcgccttctcagagatccataaggaattttcagtaaaagtctttgggatctattcggagccactgcagcctgaaccaccatggtgtacagctgtgtgtgtgtgtgtgtgtgtgtgtgtgtgtgtgtgtgtgtgtgtgtgttcccagcaaagggagagaaggagcctccctcaaaaataagttatggtctcctggagggttcccaaatatcaaataactgaaagagtttttctttcgaccatctgagtcaagatgtggtttgtcaggaggaggggggatgggaagaaagaaaaccagcccaagttctgcaacttcagcgcccacgaagcagcatctctagctttcttccatctgtccctctgcacagctggctcagcgagactgccgtgtcccgcttgtgggcaagtgacgcgtctggggagagtgatccagaaatgtcaactttgcttctcgtggctgcagatggtaatcaggtcagttgtctaatcaaagctctatcagacgtattattcattccatcacgtgactcccaagcccctcggccgtacagtaggtcacatgctcaccttaaaaagactatttggaatatcaccatctggagtggagattaatgcagaatcctacactctgatttcactcccttctgaacggaggaacaatatctgaagaccacagacagaacacatcagggacctctttgaaatcataaattctatctataaaactgagcatcagacatgcgtatctgtttacccttcctgctttctaacgcataaaaataaacgcacgggtattactcactgtatatgtgaatacagtccacagagagaaagtatgagggaaagaagaagaaactgttgcaatcacatggttcagatgaatcaaatcaaatcgaacaggcttgtgtttggcaccttctcatttaaatgtttgtgttatagaacatttatttttacgtgtgccagtaaacaagaagaaattatgtttcgttttacacggctgtgtcgaagcagattcatccatcacgtctgtcaattattttctgatcatattgtgtaatttcagatcacacagccttctttgatggatggcataaatggtctcaaacgttaacttttctgtaatattttcccctaccttccccatctctactcctcctgaaatcggcttatttccatagcagaaaaaattactacaaagaaaatcaagtaaggtgcttccaggatatggggtatgtttgggttttttttttctttttctttttaaagcatttctacatacactgcttctgtctgttctgagttttatgaaagggatggccatttcctttgtaatcatcccgtggtttttggtattagccttgataccactcatacgctctgggcaccagctttgagacactgtctgcagaccagtgtgcttacttcattgaaaatgacggaaatgaaggttctgtttattcaaacacacctaataggaaatgggggtggggtgcgaaggaaagaagcagagttttgtactatgagaaaatgaatcagaagaaagaggcgaagggtgccacggcggcggcagcagcgcacgggctggaaacctgggttcagccctccagcgcagacacacatcacgagtcagttaaagaaagcatcaggttgatgtgggaaattccaaatatacaacaattgggctttgttcgtaattggttccatgtgtgcagtaggagagtcagtgagagggtgagagagacggggagacggaaacctcttaaccacggctcacacggcgtctttggtgaggtggtttaggtttacatctcttttttctctctttcttgcttcttgcctgcactgcctggtttcagagcattggcggggggtgggaaaaaatctggaacgatacccgatgattgagccaaagcaagagaaactcatttctttgtaaaactgcacttgacgttgtaacggttttgaacaaaggataggcacactttcagaacactttatctgttgagagtcacggcatgtcattcttccagctcagttttggggtcggtgggggggacaatgatgagatggactgagaagccactgtcctcttctctgacccaggccagggcaaagccccggggagctgaatttatttacatttgactaaatgcaacttcctgtttcccaggggtattaatgagtgtttcactgtggagcttaggcttatggcatagttcagatcataagggacattttgatgaactaagtgcaaataaaacaaaaacacatgcatttgattaaggttaaaatacatatagaagagaatgttaatggtaacaaaaataaccctgggccagactcccacacatctgagtctcacacattccacatccttcccttgggaggcggggagaaggatcacttttcatattagcacaaaagcctcctcccagataatggagccctccccagtccccgcggagtaggtgaccccctccttggagtgatttcaaggctctcaaaggttgctggtccaaaaatatctttctgattgtcttgccatgggtgtcggagacttacatattcaaaattaattgtcgagtttaggtcttttttttttttttttttttttttaaatagagacagggtctcactatattgctcagggtggtcttgaactcctgggctcaagcaatctcctcgcttcggccccccaaagtgctaggattacaggcatgagccaccatgcctggccaagtatttctttccattgttagaatacaaatatgtttccccggaagggatatgcattcatactctcacagttatgaccactttaggagaagcaaggggaatgaatgttcactgagcacctacccattggcaggccatgtgctgtgaggttatcaaaggctacttccatggaggaaatgcgtttcattatccctgtttcagtggtgaagaaactggtgctcagaggggcttagtaagttggccaaggcagcacagctagaaatgtcagagctaggatgaaaaccaaagtcaactggtgtgatttcagggcccagcttgcctgtcctacaggactttatcagattacagcagtttggaaatcccaaaggaagatacatccattgaacccaacaggaaaatggaaaactctgtctttgaaaagaagagaatgtcaatataggaaattgttagattgagcaattttagagtttctggagctgctgctttgatgtcaccaggagttgggcacaggggacggaggggctaagaaccacaaagggggaggcagggaggctggcctaaggggtcaagggaggagccgagttattagagccaggggccaggtcacctagtggagtctagaaccttggagacccatccagtgggagactcagccgctgctgaagccttcatccatggtcaaggggaggtgaggagaaatgcctggcccttctttccatctgccttccaatctcctggcagcatcttccagccagttgaaagggaactgtggaaatagccatataggcagggcagggaaagggagagccatagatctgagtatatgtggctctgggccagccctgagggaccgagacattggaccaaaggaatgggaaatggtgaattaagggtgaactgaaaagaacagcaagagaaggcgggacacggtggctcatgcctgtaatcccagcactttgggactcagaggtaggtggatcacctgaggtcaggagttcaagaccagcctggccaacatagtgaaaccccgtctctactaagaacacaaacattagctgggcatggtggtgggcacctgtcatcccagctacttgggaggctgaggcaggaggatggcttgaacctgggaggtggaggttgtagcgagctgagattgcaccactgcactccagcctgggaggcagacagcatgagactctgtctcaaaggaaaaaaaaaaaaaaagaacagcaagaggaaaacctatggaacaatattacatagaaagagcaggttgttgtcaggatagtggatgacacggtaccctcagcatccaggaatggcctaatggctgctggatgtggggtgggagttgaggggggaaagatgcctcagggatggggggcagtcaacaaactgtgtgcaggagagggagatgtagaagacactcttcagttctagactctccgaagctgctgcttttgatgcctcagggagcagcacacttaaggctggcaaagccttttgtttgtttgctttgaacatttccttccagtctcaatgaaaatgtttgcattaaaaccctggaaggaaaatgcataggaatccattgagccaggtttcaggaaagtcaatggtcttgacatgccacagcaagatgtatcaaagcaaatgggtgttcttggtcacgaacagcagggtgtgaaaggggtggcgggaatggggggaatgttccattggagagagaacattttgcagtgttggtgataatggaggcagcagcaggagggggaagagtctgccgagccaacgtgtatgcacggtcacaggagcagactcatagatgaagccagtgcccgcgcggatgcatgctgaaaagccacgtgaagggtaaatgatctcctgatggaatcctgggtgctggcacggacatgcagcctggtcattgcagcccagggtgatcctgatgagccggcct

SEQ ID NO: 424 - DNA, 8060 bp, Homo sapiens
cttgcggtcgggcttgctgatgtacttctgcttctggaacatcttctccagcgccttccgctgcacgtcggagaagactgctcgacgcagcatgccccgccgaggcttcccgcgcgcggccagcggccaggagaaggtcccggggatgggcaccacgctggaggaagctgcagggtggggggaggtggcgagtgagtgggcgtacgccccccagtcccaacacggctctccctggctttttgctctgatcccttcatctctttaaaacgctcctttttctccccctggagaataggccacgaacctacaaacctgcgagagtgaaaggcgctttccgcccaaacaactttccctttcaaccgtgcaaacccggattaggtaaaaccacggaaacagagaaaacagcccccacaatagcctgtttcgtttttccattcagtggacttagggaaacaaacctgcgtacatcaactaaaacagcaatagaaaaaataaattactaaaataaaaataaaatatccagccgaggccactgtgtttctcccctaagcttttatcatttcagtggcttttgcattctttagatgaaaatgaggtgctttactattttgataaagagggaaaaatccgatttagattttttgaaaaatccaataagtattcatcttttttatattaatccttcctcccctcccccacgaaacgtaaagaattcggcccgaatacatgaaaagtggcagctaattagcacattgactgcttcccaatgggtattggtatgataaaaggggggagagttttgctttaagcgaaagaaaaaaacaaaacaaaaagaaacagagactctaatgaagcgtgaatggtaattgtgtagtaatgaactaacagaaaaagactgaggacaagcagcgaaagccatatattactgggacaaaagagatttacactttcaaactaaacacaactgcaggccaagaccattgggagaatactgatggcagaagcttctcttccccgaatcgttttcattaaatggacatgaaaagctatttataaagctcgggttgtttttgttagagcattgagatgagggagaaagggagcaaattccattattagcagcagtgtgaatggtggtggtggtggtggtggtggtggtggtggtggtgctggggggtggggggagggcgaattatctctcccctttaaaaaatcaattgcttgtttcttttgctgatatttgggagtgctgtcgtgattttacccatcccccgcaggccatacccagtttttcttctctgtatagggactctcctgcctcctttttagttttgaccagtggcagagtttttgagccatagtttgaatcatcagtgaggttacaggaagaaaacctggtggaagctgcctaaggtgttgctgttttaggctgggacacaattatgggctttcttctaactgcttcttattttgcaagatcaacggtattttataatacagggtgggaaaggagtatgagaaggggtttggaaatcaggctggaaataggttgggattgggggaggatctaatccccctccccctgggcgaccctaggcatcccacacaagagggcaccccatgtggtcttgtgaaaagcccgaagccctgaatgagtcttaaagagaaattagccccggctggtaggtgtctctcggcggcgtggagggactagggccggtctgtgtgtggctgcccggaggagctgaccaattggtcatggtgctgaaacctttgtggggaatcgtggccaagtgcactgactctgtgggaaaacggcggcgtgaagggatgccaacagctcctcgccgggaagggaaccgcctcaaattgggaccatgacaattcctgctaatttgtagagcagggaattggtgcaaagtgtcaagcagtcactgcttgtgctcaatagggcatcaaattggcgcgacggattcatgaatgttatacgcctcgcaacctctgaaccagagcataaccccgaggggtggacggagaaatacggcttcggagcagggagcgatgggccggggctggggcgccgccctgcctcgcgcaaagaagggggacgagacctacctgggaaataagaagatctgatgaaaggctgaaaagacccttcgaagtagggaaaggcgaaggtcttgggagggacgctctggagcaaggctggggatgtttctggtgggcgatggaggggggacagaaggagagagggagacagaaagaatctgattacgtacttgcctattgtatagcacactgaacacacgatataattagcccttcatctggtttcaaagacatctttcttatacgttgacagggtaaaataaatcttcccaacattgtcttatctgtaaaactcttttctttctccccaacgtaattctctgcgccgtcccactctaccccaatctccatcctaggcactaacgagataggactgagtggggaggaaagaaattgcagatttataatatttgctaatccaataaatatatcatattgagtttaaaaaaaaaaactgtctcctagaagctcgaaggcagaaacgcagacgtccaggagcgtgcgctcagcgttactgcaccagatgactgcgcacagtctccgactgcgtgtgctcaagttcactccgaggatggggcgagcctggaggcttttcttccccggaattgactggactattctcacattgcctgacgtagggtctcagagttcgtgcgtattgtgtgtgcaccgatgtgtgtgtgggggcccgctcgctagaggaaactgaggccaggatgactccgcgcatgcctagtacctgaatgggcccttagggttctgacctcgcttacctgttctgggccccgaggagaggatggcgttcactccaaacttcagaaacgtcgtctcgctggcaggggagaaggcagtcggcggagagccgccccgtcggctgccgggacccggggagcccaggtccgaggcccccgtgtcggtgagggccgtgggggccccctgcctgggcggcgacatgctggcggtgggcacgctgcggggcaggtaggcggggggtcggctgatgcggatcagatcctccaccaggaagctggagtggccggaaaatgccgactgcaaggactggggcagcgtcaaggtgggcgtgggccgcaggaggctagggtacccggcggggggcgcgaggaggccggggaacatcatggtaggcgcgggcgggcgaaataacccttctttcagtggccggagggtaaacgcctcgcttcccgcccctcccgcccccacagtgtcctctctcttgggcttagcaaacgtctccaagtaacaatcccacttgggcgtctgcgagtcctccgtggtcctctcgtcgaggtgatggttttatagtggcccgcccgctaaagcactttgaaaagtgacagctctgacaatgaagttcaacaaagttctccactcgagcttcattcgccggaggctctggactctctgattggcgcaggggtgcaatttatgattggattagtcttcataagcatggcccgcacaatgggccggcaacaaaggcccgcgcgcatcaattttgcatatcgaccgcctctttgcaatacagtgcgcccccaaagctctcgccaaaggtttttgttccgaagcaacacccgggctaattaaatgcctatttagaagtttcagatgacatcttgcctcatagaaaaggaattatttaaagaacccactaaatttatttgcagctcccctgctaagcctggaaaataaatcaataaatattcatagaaatacatcttcaggctatcagcaaagttgccctccctcttgtgggggtagggcaatgaaaagtttcaagtcagtggacatgaaaatatactccctttccggtctctagccctatccgttactccagctgaagcataaagcaaatgtaggggtgagtgaaatcagtgttagaagtcccattctgacgactcagggaaacttggaaacggatgctttggggccactggatgtgtgtccgtaagagtggggagaggtctggagttatttcatttcgggagactggttgagtttgagcgttggtggatacctgaaaagtaaaacgagtctccttcaaattcccagcaacttggaaaacgattttctctaggagtttctgcaaggggctgtccgcacctcaccttgcgggaggagcggaggagagcggcgctgggctgccgagcggcaggattccgcttgcaaagagcttaggctgaccggaaactgcctcgggcaagggtatccaaaggctgtgagtgctatgctggccgttctccaaacacagggagctctcggcagtttaagttgaaactcacagccctgacattttaagccatagcagcgaaggtccagacgtcgtctggagagaaccctaccacttgcggggcccttaacttggcccaaggtttggcagcttcttaattaactacaacgcacaaacgcgtgaaaaccagagggaagggatgcggttcccaagaatgttggtccactccgggaaagcctcccctgaatgtggggcttcaaaggagaatcttcctggagacagtcccttcgctttcctctggttggggctgaggtggtactaagactcgattccccccatttctctgttcggcgagataacagatgtgttaaatgtcccattcatctctttagtgtggctgaacctccccaaagagaagtgtgcagccccgccaggccgccctgatcctattaaccatgaactaactgtcaccttcagctggttttcctttttgctttttaacacaaagctttctcaaaaatcttattaaccagctttatttctctcgatggttttgttcggggtgttttgtgttgatgatctccatgtcgctgctttaaccattcaataaaagtgcatctgcgatttatatcacattaaaccagaaacggagccggctaaaactctcccttgattcaaattaaaaagttatttagggcccagctccagaggcgaattaatgctagaagatgacgtaagtgcggagtttctgagcccaagaccgctcatgctcatgggcagcgggagaaaaccaatcaggaaagaaacaacttttaaataaggggctatttaaatatgggaagcgccttgctggagttaattggagtcccctggaaacggaagaaggagatctgtcgaagaacgtcaaaagttcctttttgaagtttgcaataaaataggtgagaaaagcataagctatctgaacacctgcactttaaccttgccatgagacagtttcccattgcaataagactggctctctcccttcctctcccttacttttttcctcaggcccacctccctccttctcccactccctttccctctgccccccacccctttttctccccgagtcttaaggacttgggcaattgccagttcccagaaggacgcgccgggggcttcaggatgtttgattccctaccggtgaagcgcttgtccaagtcttccggatgatcagaatagagtctatatttgccaaaatcaacttggattttgtttttttttggaggggggaacggtaagaacttgaagccagcgtgagcccttcccagctcctccttccctgttggggcatttgccggggtgtagttttcaccgtttcctgtccgtcgacaggcttcatgccacccctagcccccaccccaagccccagccattctgcctcactatagactaactgctactaacttctcggcttttaaaagtctaccctgccattttttggagggtggatcaaccccttgctgcgatccacgtggaccctgcttcctggggtcggtctccacagcctcctaaagaattcctaaagcgccaaagaggaaaagtgagggcgggggcgagggggcgagggctggccgcccgtgaaaggaaaaataaatcctaaggaagcaagaaatcggacgaaaggatcttactttaagtgatctccttgaacgcgtcttttcaaactccgcgatagcccaaggagctgcgcggcgcggcggctgcggctaagacctgtgactaatgccatttgacctgagcccatggggttttgtgcgtcctgccattcactgttatgtcgttatcttcaagtttatttcggagaaatcactcgcgttctttgtctcaaggctgagctttctgtctatttctctttcaagagaaaagaagacgggaggggaaaagagagaatcggagtccctggtttggggtttaaggtccttgcctacgctgcgggggaggccgcagcagatccggctggggctccccgggcctaggtggccaaagctgccgaaacctgccttggatagtagaaagagcgtgtcggaacgcactctgggggtttcgttccccccgcgcaggggagagcgagcatgttcctgccccgggcgccgtgcggtcgcagcagcagcgcggccctctccagtgcgagccgtgcctggaatgtctcgggtaagcgaagggccagcaagcgaggcgaaacggacactataaagcagagagtggtgtgagcttccccgccctctgaaaagatggcaagtctccgtttcgggaaggctgcaacgctaaggtcaccctttgcaggcttcggacccccagtcctccatgctccctgccggagcagccaacagagtgagagcgcattttggaaagattggccggatgccgggcggcgacagggaaaagcgcccgacgcctggctttggggtggggggtgtggggagggggggcagggagctaacgggcgaggcgaaggaggagggctgcgaggctcggactgaaagagctttcctaccgccccagcccctcttcgcaagcctctcttttaagacagctctaaggggttcaccttcagaataggccactaggagctaccgctgccccagctctttctagtgtctcccccctcaccccccatccctttcacactcactcccctctttttccttgaaaatccttctattgtgccaatcaagcagatggtttgcaggaaatatagcttggcctcgctgaccgaaacaaattttaactagctttccaagcccgaaacgtttgttttgctcttacaaaatagcccccaaaacagctggcaagggtgaattaaacccattaaagacacatttataagaaattatattcacatagattgcccgaacccccttgtgctgcctaagagaggagatgagcgcatttaaatgaaaatgtcaccggacgctcccctccttaacgtagcctgaaagtctcaaaacattttactaaatagattaacttgactattgtcttgcatcacatttatcagcttcattaagtgaatagctgaacaaatatattacgcatgcatgaaaagctctttttcgaggagtctcattgtatcctcagccctgacaggtggttaactgtgtgttgtttttttgtgtgtgtgggtttttttggtgttttctttttctttttttttattattattttttaacccgaataaaggggatctctgtagagcggtgcagggcttgcagtgcggacttggagaaagtttacttcaactcccttcttggacaaccctctgccctagcaatattaaaaccatgttgggccaaggagatatgagaccgttcaaaataatcaaaattaaattttggtaagcccagccttgagtgctttctctctccatcattatctctgcccacttgtctgggaaattaatttcatactgctactttttaaagctgaagattccgtcccactctgcttgaaaatagccattgtttctccttgcttaaccagctcttcacagactgcaggattaaatattctttttttttaaaaaaaagaaaataataataaagacagagtctcattttgttgtccaggctagtttccaactcctggcctcaagtgatcctccagcatctaaatattcttttaactcacatttgaatccatttcactttactatatg

SEQ ID NO: 425 - DNA, 8060 bp, Homo sapiens
gcccccgccgcggcagctggtagacaagagacgtgttttacctcctcgacgtctggaccagtctggaagggacggagacgctgtggcgtctctctgggggtctctccccgcccgggtggacgtggcgctccctcctcggcccctggggctcagcgcagccatgcagccctcgcctgcaacctgcagtcatcccgcaccgcggcaacaacataaagtcgtcgttgacgtcgaccatgggcacgtagaaggagggcacgtcgttcacgcacagggactagtgcccagcggggtccagcttctgcactttcagctgccactccatcctctgcatggcgtttagggccgcggcctcgtgctgctgccacgtgagcaggtcttcatgcggttgtacttgtggtccaagtcatggagccaggagatgaactggctggtgttgagccggtcgcgcactgacttgttctcgtcgcgctggctctctaggggcatgttttaaacctcagagtccagcagcatcgtgcaggcgctgaatggcactgcctggttggcgatgatcctggctgcccagcagtgaacctgcagaatctcctgctcataggacatatcagcttctactgctcgatgctgtgctgcagacgtagcttttcccggaccggctcctgctgcctgaacagctagttcagggactccaccagcgagggagggggtgcgatcatgggcatgtggagcttgctgagagacttgccgtccaggagataggagcccgtgtaggtgacgtattcggcgtaccactgggtcgcctgtggcgtgatgcagcacagaatcttgcgcttctcctcgatcttcttcctgatgtgcaggaattcgaagtaggggttggccctgtcgctgtggtaggggtagatggcgtccagcttgatggcgtccacgatggtggccagcgtctgctggatcacctcccgcgtctgctgcgtggacgtgttcagctgctgggtggagtgctggaagtggcgtttgcgcggatgctgggctgggcgtagtcctcctccgagccgcgggcctgaggcacactccttggagtgaggtgtgccctacttgctctcgttcacgagcatctgccggttcctggtgatgcagtgagggatctaccccactctgggggctttcggggcttcggccgtgggttttggttctgattctgtggcttctgggtcgatgccgcagggagggccttcggctggggcggcagcacgggaggccgcagtgttgtcgtgggggccagcactgtccgcagcctgggcttgtgccacagtgtccatggggggcaaggggtgtcgggggcacagagggatgcggcagggggtaggaggtgttcagcctcggccccctggtctctgcttcccagttggcactgttcagggcgaacgggtgtgggctccatgctggagtccagatccccagaggccctctcttctggcactgcttctgcctccgtagcttctagagccacgtccagctttggctcctctgagggctcaggctcgagctctgtggggagctgggtggaggcctggtcaggaggcagtgacggctgctccttagccactaaagcggaaacatccccacccttacgaccacaggggcccctggagggatcttttctgaaggagcaagactttcttctgtgggttctgtttcaacatctgggacatctttagtctgcaagggaagctccggcagtgagaaggaccccaggtccaggtcgtcctcggagccggcgaaggcgtctgcccagggcatcggctccacctggcggagggtagacaggctgtggctgttgtccaggaggctattttccaggggttccagagcctccacctgagccacagtggttacaggcctcaggggccatgtccagcagagattccggaagtgacttgcagttgttgaagaaggattccagcccggagggaggggcgtaaggagccgcctctgaggtagagatggtggcggggatggcttccaccctgtctttgacatcctccagtcctggctcagcgatgagcagagtgttctgggagagagaggcggaaaggggggggcgggtatggcacctctgaggcgctgaagggccctggggctgcagagtggagggagtccgcggagcagaagtattctggggactcaggaaatctctgtggagacttcagcaggagttctgagcccacaggccagctgacagggttttcagaggcgctcccgatcaggctggaagcgagggcctgctcggcggggtgggcccactcgacaggctcctcagtgatgacggtgctgaccctcttccagcggctccaggtagctgggctccggggggatgatgggggctgtagcctgctggtcctcggtggcgtccaggtgcgggggaatggccccttcgagggaaggaaccagcagcttatctctgggggaaggggaaggttttgcttgtaaatttgagaagacgccctctggagacggggtgacagtgacagtggtagagcatcgactttgggcgaggggaggccatagtctgtggaatattaccctggggacaagcaagcaaacttctccacgggaaccgggggcaggggcgccctgtcttccgtctagtgcggcagggtaaagtcgtagctggaggcggcaggaacgttctgctgcctgaggagcttgtcttccaagctgaattcctcctagggagtcctcctaatatcagcagagacctagcggtaaaagtttatggagagaggcttggcaggagcctggctggcgttttccaaaagcccacttgatgccgcggagaacctgtcaaaaaaggaggcaggcaggcactggagggagcagtgggcacgggcgtggagggcggggagtgggcgcagtcgaacacaaggtccgtgtagtcatcggtgctgcaggacggggtcctgggcgtgtgcatcacctcctcgtagctgaggcaggacagcaccgacgtaggggtgggcacaccggtcggctctggtcaggcctaggagatgcaggtaggacctctttcatgtgaggccctgcgagccagtctttggagtctgcacctgatcctgggcgtggcttattttcggcagcaggtggaataggagtcaactccttgagctttttgtctttaaagggagggtccagccccggaggtttcttggcaggaatttccagacccttcttccgcccgtcgtctgctggcttcgccctctccttgaggttggggtctctggactggtgcctcagcttctccatctgcttcatcctctccttgtgccccttgtggcgctcctcgatctccaggtccttctgggagaacatcctctggaagctgattatcatcatgtcgccatccccccggagcttttccctgggcctggcatttttcttgcctgggtctttggatggcgatactttatcatcccctttgctcatcttcacagagtcgtccttttctttttctgcactgtccttgaatttctccttcagtttggccttcctgagcctcgggtcctcatccctggacttgtctttgagtgcacggggagggctgtccttgtccctggcagtgggcttctgcttggtccctgtgatgccgcaggagccagtctgcatgcctgttccggttcttcctcttctcgtctgtcaatttctccctttgtttctctctcttattcttcacttttaggatgttgatggtactagatccataaggctttagttccttttctattttcttggaagtttctctctctgaatcatttttatctttcttttcggtagaaaataattcaacggttttatttagcctatcttctatgacagctttcatgttgtaagaaactccataagcaaccatctccaggaagtccttttcatactggccggtgtccttcctgctgccgccctccttgtaatctctgcccttctcttctgggacttttctttcttggctgtctctctcagtagtggctctacttggatgaggatgaggagtgtctgtgcctctccttctctttcagcttctccgggaggcaggcgctctccctggcctcctcctacatgggtggctgcttgagagagatctccaggaaggcagtcatccctggctcctgccctcagtctgtgcagctgtcagaggagacctcactgattttatcactggagtcgtctctgtactcatggagagcttcttccaacttttcaagcaggcttttttccatgtcagcacttctcaaggacttcctctccttggaatattctttatctgacttctctttgtgtttgctgttagccttgtcttcagcagactgtttcttttcagccttctcagggagcttctgtttatttttcttatcttgtgtggagtccactgaagctctttccgtcctgttcttatacttttctggtactctttaaccttcttctccttgtgcttttcaaggactttctcttttttatctgtcacaccgtcagcagcccctgtgtcctttctcttgtctttgggctccttgtccttttgcctcttgggtgctgctcatcagaagaggacttcctgtgtctgtcagaggcataggcctcccgcccttcgtccttctcctagaggtcatccatcctctgtaagtcgctggcctctccgatcttgaacctactccccatgtagttgtctttgtcatcctctctctcttctgtgaatacgtctgcgacgtaccagcttttctccttgcctttcttgtcattttttttttcagagaagtcttctgagataatcccagggaaagttttctcctttttctctttcccttggtcaagagacactttccttttttttgtctttgccatgtgtgtatttgtgtttattccttggtatcttttttctctttaaaacatttatcaaattctctgtccttctgacatttttcgaggatagatttctcacttttgtccttgttactggacttctgtttgtatttttctggatttgttttctccttcctttccttatcaaggccgtccttcttctcttgcactgggtcttgcagttcccacggttccaggcccttcccaaaatcgcagtcagacttttccttgaagacactctggtagcctcactccttcagctcctcgcggtgtgcggtgtgcctcctctggcttggccctgcagtccctgtgctccttggagctctggagggtgtcctttttgtcctggctggcctctacggactctctctcctctttttgtcattttccaaaaggtagccggggacactttgtgcttttcagtctggtcttttctcagagtttttatccaaatagtccttgtccttttggaagaagggctctctgtagtctcgcttctcccgggccctgctgtcctgcttcctctcctggctgtcctccttcactgtttctaagatcagcttggccacagagttattcttcaagtccctgtagtctgtcactgaagagtcccagctgtctcccactttgaaatcaaaggatgaatcagacaagtcaaaaaaaccaccgatctggctgattgtcagaaaggctaaatttgatgtcttcattctccagaaactgatttttattaaaatattcatcaaaagcagaatcttccctataaaccttttcttttttgagtttttctttatcttctttaaaagtcttctccttctcttttgaaatgttgtcctcttttaaatcattctttttctctaattttgacggcccgtcttttcacttactctttctctcctctttgtacagtctcagtttttcttcctttgaagacttttccttcagagatttctccttttctgctgtattcgaacagtctttctcttcttggaaagatctgctgatatctttgttcatgcctttgattctcttcagtgatttttcatctttggagaccttaatgatctcatctttaaagagccattctttctcttctgatatcattttgctaagtttctcttcttttttaaagtggtctcgatcaagctataacacttttaacttattttcagtggaaatatcattctctaaaagtatagccttaatctgacttttgcttgtagtcctcatattcatacgtaaaacgttccaatttcagctcttggctgatagaacactgtcccttctccttgtttttgtgtttgtgttttgttttatgtttttttgacaactttcccctccttgttcagcttggggacggtgccctctgcgctggagaggaaggggcttctcttctctgacagggagccctgcagcctgcccagcttcctgtgctctggcttcttcctcactggtttcagcgattccacactggagcccccagaggagtaatcagactggcttgtcagtctcctccttgtggattctgataaagaactgacctctgaccaagccaggagagaaatggttttccaattgtctgtctgccagtgcttggtgtgctggtttgtattgttggggttctgcttctgggtagcagagcccccatgagatgaggtggaggaggcagacagggagatgaacagggaggggtccttcaacaccagcggggaacacttgaggcagctggagctccccatggagtccctgtcatcctccccactctctgaggactcactttccgactctgaggaaaagaacttgtcaatccattttccaaagcaaacctctctgccttttgtttatctgttttccttcacttctttttcatttttttttccttctgctgcttggcattagaagcctcccatttcttactaccaggcaatattgtatgtgccgagagtctcagcttctctcctgtgtccccatggtgacactcacgtcctcctcgtctgatgtgtctgacagaatatgatgggatgctttctttggtgcaatagtgttatttttagtgtaacttttaacctccattttgagtatagagataaaactattggattttgtttcttttctgtaatacttttttaacaggttcattcagagcacctttctcttctatttcagtgactcatagatatatggtaaaaaaaataaaaaataatgccttcgatggcttcctctactctttcaacaaccttctttctaattatggctacttaccacttctctgctttcatgaatatctaacctgtgttcaataaccacaaagcatcaatatcagctaatacctattctacatcttgcagataagtagtggggttttatatactactttaggccagtgtgaaaaggatcttacatgtttcacttatattactaagttgtaatcactttttagcttaccagtttccctaaagagaatataagcttcaagatagcaccaccaaaaaaagtcaattttgtatgtctaccttcttgtaatagagtgaattattgtttccaatttatcagttccatgtagtagttatttacatactcatcctcataccattgtcatggcttcctttacctccattgacttggtgcttggccacaatcacttgttttcacgaacataatattaatggacaagatatgagtgaacacttgaaatgagcatatatgattgactttgtgctcttctcctccatctttttccattggcagcaccactttgcacttcctctgatccaaggataatgaataacacttagagcagacctagaacaacctcagacattggggccaaacacagctgagcctagcctagatggctaaacctgagatgatgtgaagacatctgtgatacagatataaatgcttatttttgtataccactgagattttctggtggtttattttgtagcattatgtttaactctctatatttattacagtgtttacaatgtagtagatatctcaacacttgtttaaaatgaacaaaatgaccattatttaaatcaacccatgaaacagacagacacatttgggtagaagatactgcacacaataatcataaacaagatgggagtttttaagaaaacgcatatggatagatcaaagtatgtccccat

SEQ ID NO: 426 - DNA, 8060 bp, Homo sapiens
acatgcatctttgatgctgctagagttactttttgattcatttaacgcttgtacaaggctattttttaaaattaatttattgtgttgagacagggactcactttgtaacctaggctggcatgaattgacaccattgtagctcactgcagcctcaaaatcctgggctcaagcgatcctcctgcctcagcctcccaaagtgccgggatgataggtgtgaaccaccatgcccggcctataattatttttgaatatcatctcatacctagtacatatttaaatttccctaattatctcaaaattgtatttttttatagttggcttgtttaaattagggcccaaacaaagtgcacacatttcaggctttattcaataaatactaaggacaactataagcctggcactttgctagatgctggggacgaaaacacaagtccctgcccttacgttgctcagaagacgtagggaagacagagtgtaattagggaatcatagaaataaaggtaaaattgcaatactatgagtacaaacatactgtgctatgaggaatggcatcagtggaccctcagggagacttgattagccaaatgagggggaagagagatccacgcagagttacagcattggccaagatcctgcagcaggaggggtcagagagtccaagtcgcagaaaaacagcgtttttggactgcagcaggtgaaaaggacgattgtgcttgatcaggtttaagacactagcacggtctgatcacgtgtggtcttatggtcactggaaggactttggactttattcatcccacagacaatgaaaagtcctgggagggttttgaggaaggggccatagggtcaggtctacatgtcaaaatcctgccttgctggggtaactggagagcgagaggagttaggagaccaggtgagagtgaggtgagaggaaggcacctggggagattgagaacacgcacactggatccagatgcttacatttttatccttattctatcattttgtgctgtgtgactttgggcaagtcacttaacctctctgtgcttctgtttcatcatgtgttaaacaacactacctcggaaggttgttgtgaggatgcaatggaaagtattttattctattctattttattttattttggcactagagtcttgctttgtcgcccaggatgcagtgcagtggcacgatcccggctcactgcaatctctgcctccagggttcaagcaattctcctgcctcagcctccggagtacctaagactacaggtgcgcgctaccatgcccgcctaattttttgtatttttagtagagatgggatctcaccatgttggccaggctggtctcgaactcctgagctcagtcaatctgcccactttggcatcccaaagtgctgggattacaggcgtgagctactgtgcccggccacagtggaaagtattttttaaagtgtttggcatataaaagggacagtaagcacatagttatattgttaagtggacagacttgaggaggggatggctgtgtttgagggatggagggaggccggtatgactggaagaaaataatgagggtaggtatttctggaaggggatcccgtgaaaatgtagatttgaatccagtaggtctgggggtgggccctggagtaagtgtctaccgcacgtgtgtgtgtgagagtgtgcaggagagcccgttgtgaaacatataccagcacaccactgactatagttaaaccaagttgaatgtgttgacttattgtaatgagagacagcacacacacacacacacacacacacacacacacacacacacacacacacacacacacacgttgtctcagtagaagggtgttagcaaggacttattgttagagccgggctgtgtcaggtgactttggggagggttcacgggggtggggctttgctctggatgggagactgatggaaagcacaggcaagcccatgactgggaatcttcatctcattgggaaccaggaggggtagatggagctaatgctggggttaatgaaaaagcagccgtcggctctgagctgggagggggggattttggtcatttttgtggtttggacaatgttcatgtttgttgtgttgagacatgattcaggggtggtcttgtttttgtctcagtccatcacggtcacagagtggccttgcttgatgttggtgttacgggaaatgttttatgttcggcaggagagcaccagggccgggctgtcagtgtctgcttccctccctttcagcagctataacaaagacaccccaaaacacaacatcataaagaagacagaagtgtatttcttttcttttctcccttgctcctttcctctctttctccttcttccctccctccatctctctcttttctttctctccctctctttttgtttttgagatggagtctcactctgtcgcccaggctggagtgcagtggcgcaatcttggctcactgcaacctctgcctcctgggttcaagtgattcttctgcctcagcctcccgagtagctgggactacaggcacacaccaacacacccggcttttttgtatttttagtagatggggtttcaccatattggccaggatggtctcgaactcctgacctcgtgatctgcccgcttcagcctcccaaagtgctgggattacaggagtgagccactgcaccaggctccgtccctccctccctcccttccttccttccttccttctctctttctgtctctctttctccctttctctgtcacccaggctgaagtgcattggtacaatcatggctcactgcaacctctaactcctggcctcaagcaatcctcccaccctagcctcctcagtagctgggactacaggcacacaacatcatgcccagataattaaaaatttttttttgtagagatagggtgttgctatgttacctgcctcagctggtcaagaaccagaattgtatttctctcttgtgtaatgaaaggcagggttgtgggacatcttggcttggtgagaagatttagagataagagttcctcccatactgttgcttgccatatctgaacatggtggaggctgggttattgctaatccacattccagtccaagagaaagggcagagtccaagaaaagcagtaatcttttaagcaaatgactccaaagttacacctctcactccagctaacacttcattggtgagagcatggtcacatggccacacttacctgcaagggagtctgggaactgttgtctctagctgggaagccatgtgctgggtaaaactctaggattgtaggggaaggggaaaatggagtgcatggaacaactagcacttggccataagagagagaccagttagctgatggtggggtggtcaaaaagggtccatatttgagaactgttatctgtgaagttccaatcaggagactgattctgagagtgttggaaaaactgaaaactgggctgggcatagtggcttatgcctgtaatcccagcattttgggaggacgaggcaggaggatcacaaggtcatgagattgagatcatcctggctaacacagtgaaaccccgtctctactaaaaatacaaaaattagctgggcgtggtagcgggtgcctgtagtctcagctactcgggaggctgaggcaggagaatggcgtgaacccgggaggcagagcttgcagtgagccgagattgcgccactgcactccagcctgggcgacagaacaagactctgtctcaaaaaaaaaaaacaaaaaacctgaaaactggattcaagtgttgttactgaagtgatgctgccacagtgaagaagtaagcctggggtgactagaagaggaagcaaaaaggagcaagttcctcctgcttcctcctgccttgcaggctcccactggcgcccctgttaggcagagcctaataggaacccagctgttgaaggagaaatgtggttagtagagtctcaacccaggcatcacagagccggtgtcatggggtggagtttggagctaagagacagtaactcaacatctggcatacaagctattctgggtgtggcatgggcaagcaattggtgatggccatttaagcagaatcatggctgaggagggctcagggcagctgacactgggttctctgtcctcaggagccctccttatggacctggagaccccagaggagatgcaggctcggagcctgggcaggcccatcaaatcctcgtgagttgtccctggcccccatgacctctatcttccgcctccccaaatgtgatggcagtgaaccctgacctcagaggtccctgcctgttcgctctctccctagaaagcagtacctgcggcaggtcattgcagagtacgaggcactggaccgagaactcccgtgcatccggaagttccccacaccaccagcttcccagcccctctgcctctgcatggagaccttggtgagtggacctgtgcccttattttctgcacagttttggtggggtgatgggaagggcacaggctgagaagcagtgtggccagagtttaaattcaggcttttggcttataagctgtgggcttgccaccaggacagtttgctgaaaactgattgtgaatttgtcaaagggtcagtcatgaaatctactgctcatgtcagaggggagaccaacgggcaaagaaaggggaggctgaggggggcagggagggaggacaaaaggagtcctactaatccacttctgtaaagtttacaaatataacaaaaactcaagaaaaagcccatgtgtgtcgggtgcggtggctcacgcctgtaatcccagcactttgggaggctgaggtgggtggatcactagaggtcaggagtttgagactagcctggctaacatggtgaaaccccgtctctattaaaaatacaaacattaggcaggcgtggtggcaggtggctggaatcccagctactggggaggctgaggcaggagaatcgcttgaacctgggaggtggaggttgcagtgagccgagatcgtgccactgcactccagcctgggtgacaaagtgagactctgtcaaaaaaaaaaggaaggaagaaagaaagaaagaaggaaggaaggaagggagggagggaaaggaaaggaaaggaaggaagggagggagggaaagaaagaggtcatgtttttgacagattcagtaaactggtcctccctgccttcaatcagaagaggtatatatgagagtcccaggcactcaacaattgactgagaagagctgatgtcaataggtgcttactgtgtgccaggcacaggcctccaaggtaccctctcagctaatccgtgtaactctccaccctgcatacagggattgctgtcctcgttttagggatcagtctccaccccatcactccacttctttgtggctttgagcaagggactctccagcctcccctctcaccccagtcaaggaatgactttctggaagtgacatcatttttcagtgaaatcgtgaaaattttcatttcattttagttcctcagcaattttatgtgctatgacaactgttatcacccttgacatgctaatcacgtgatgcaactgtgtttagtgatcagtccacgtttctgaatgttaaatagattgacaagacatcaaaacccctatgacccttatcttttgactactgaacattcttaaaatgctaatacgaatataaaaggaaaggtgtgtaacttaaatcctggcagaaattttcaagaactttcaggcgcatccattgcaaattgctgggaaagtttttggtagattcgtaaagttggctaagttggtgaatcattcagccaactgttcattgactttggggcaaattggcttggtgagaattgatttttttggagaatgacctagagtgatagtagatgctttcccatctgagagataatctgtcgtctcctttgaccatagcgacagtaccctgggattaagagcgatccttgcccctcaaatgccacctggaactctgtggcaggttctgcaggtggggtctagggtggtgacttctgaacccaaaatgaaccaggaggccacgggctgaggttctctctccgacacccgcagcccgaggaggattttacccacctggaggtgctgcaagccctggaggcccagttaccaggggccatggagagcgggcgcgtgagcagcatccgctttgagaacatgaacgtcatctgtgggactgctgggcgccggaaccggtgagtaagcggcgggggcggggcctggagcgagcgggaggggcggggcccggggcgaccgggtaagagcgtggttggttttagagcgctgagggacgtggccaagagtgaaagcatgaatgggcggggcccggggcgactagataagagcgtggttggtgtaagggtgctgaggggcgggccccggagccactagataagagcgtggttggtgtaagggtgttgtgaggcggggcgacagtggagtgacagcttgggggggcggggccaggagggactagataagagcgagattggtgcagagccactgaggggcggggccaagagtgagcgcggttggaggtaaggtccggtgagatcagagagaaggagggatctcgagtgagtaggggcccgagtttgagtgacccagtagtgaccgggatagaggtctgagcctggaaaggcagctgtgagggggtggaagagactgagcacatagtaggtgtggggccaggggtgatagggtggggacaggcctggagtgcctagggtagagcgcagcctgcagtcgccagtggagggtcgggcctttgggcggtttgagatggagcctcgacagacagtgattaggacgcagaaccaggctaagagagcgtaaggagcctagagcgacccaggcgagagggcagggctggaggggagtttagggacggagcgatggtccgctggaccagggcctgtaaacgactccagggaccaggcagggactcttcgacgatcaaagccagggctgaaacgacctgcgagttccttttccgtccccaccccccttacaggtggctcatcgcggtcacggacttccagacgcgctcgcgcttgctgcgctccgggctcagtccccgcgggcttgcgcaccagatcgtgcgccacgacgacctcctgctgggcgactaccgcctgcacctgcgccgctccctggtccggcggcgcatgctcgaggccctgggggcggagccgaacgaggaggcctgacgcccgggcgggccccggcagcgcttgcgcaccgccccgcgggctggggccacccacccggagccccggaggacagggggcgttgccttcccaggaaggaggcggggccggctcgagggggtggatactgtgagtttaattataaagaatgacctggtacaaaagccatttctctctgcaaaatcttggtggggagtcaggggaagggaggtgatggggggtaggaatgaacccccatgttataatcccgcgtccctaatcttcctccagtccctgtacgtggacgcctgggtcccaatcccttgagggatgaactgaagcccgcgaaagggaagacctgggcaccggggctttcagcgcgtgccgagccctgtctcagcgagaatcagacgtcctcatccgcccccctcctcttcccctcccacccccccttggaagacaattctcgggcttttatttcaggttttttttctggatttttttgtgtgttctaggggttttgtgttttttttttctgttttttatattttcttcttttgttattgttcctctttttgctttttctctcctctccaccccgcgctgtccccgcattcggtccctccccactccccaccccgacctctcctcccccccccaccccctacaccctccccaaccccgcggcacccatccagaatgaacgagcccttgatagacgggcgccgcgcaggccccctgcggactgggggcatccgacaagggggagggggcgggtaggggtccagcgcggcctctgcccctctctcaccacccctcccccctcccacgaccctcccacgaggttccccgca

SEQ ID NO: 427 - DNA, 8060 bp, Homo sapiens
ctgcccagtgggacccctgagtttactcactttaactttcattttctagccattaggactttcaggttcccagaaaaattaatgacatgtagatgtcagcaaactctcaggccctgaagagtactgacttgggactcctaactgttttggtcctcagaggcagaggtgaaaggggtcaagagagaagacaggaggtcgggtagacgctggggaagacaaaaaaacagaggagcgctagtgatgaggagggctaaagagttaagagtctgcccttgtgccgtggcgcactcagtctgcatgttcattcatttaacgaacaaaccaggccgaagaagggcccactgttagatcaggtcacatctgaccccaaatccaagccccagctctactactttctaaatgtatgatcgatcttaggcaaactacttaagttccttctgcatcccttctaaagcagggacacttgccttatcttactcaaaaaaaaaaaagtaataataaaaattaaaaacaaagtggggaaacaagccccactatttcccaaggcacctatgaggaatatgtatgaaaataattttgcaaccttaaaatgatttttaaaaattagtgttactgtccctctacagtttaacagccctctaattgtgagaggcaagagggcaggggaggaacagcatcagaaaggaggggttctgtcgcacacggagccatcgctctctctgccaggcagagtcagacctctgcttggactctataatttctaggtgccagaagtggctgcataacgacccaaagcactggggcctgcctcgtctctctaaatggcagagcttccccttcaaagtcgtttcaggttgggtgcagtggctcatgcctgtaatcctagcactttgggaggctgaggtgggtggatcatctgaggtcaggagttcgagaccagcctggccaacatggtgagaccccatctctactaaaaatacaaaaattagctgggcgtggtggtgcatggctgtaatctcagctactcaggaggctgaggcaggagaatcccttgatctcgggaggcagaggctgcagtgagccaagattgtgccactgcactccagcctgggtgacaaaacaaggctctgtctccaaaaaaaaaaaaaaagtcgtttcagagtcagagctgggagagcatgtccagacaaagaaaagaaggtctcctcagaaggctggtcggcctcatcccagcactcctgaagagtgacaaactgcggtctactcctgaagacctaagtctggtcagagaccaatggccagtgagcagtcaggcctctctggccctgcccctcagatgcccaggctgaccagatcagagaaactaggttggttgaagaagtctccaatgaaccccaaaggaacccacacagatacagagcctgtgatccagctgttgaccctaataaggaaggcttcttctgttgtccgataaaaagtgaaataagtaggccgggcacggtggttcacacctgtaatctcagcactttgggaggctgaggcgggtggatcacctgaagtcaggagttcgagaccagcccggccaacatggcgaaaccccatctctactaaaaatacaaaaattagccgggtgtggtggcaggcgcctgttaatcccagctactcaggaggctgaggcaagagaactgcttgaacccaggaggcagaggttgcagtgagccaagatcacgccactgcactccagcctgggcgacagagcaagactccatctcaaaaacaaacaaacaaaaaagtgaagaaagtacatcctagctctactcaaaagactgtaggaatcagatactagccactgtccagaagccctcaaacacacctcaaggccaaaaaacacagcacttttaagtggcaagcgagggtggtaaaggtagcccagaacactgaagagctacagaagttcccacaaactgcacggctttccgtcccttcctccactgtagatagcaagggtcagtcatggcctcagagccaggctactcctcgttaaggtacagtctccggcctgtactttggccacataacaaagcttggtctgagacagcagctatttcacacacctaagccccaagcaacagacaaggatcagtcaatatggttgagggaacctgcactttctggcatgtatcggaattcctcaggctacaattaaaaatccagaactgccattgtgatcttgacttagtcctcagtaataagtccaagccctgaagggattgcagacagaccctggcgtggtgtggacctgttgctcagggaggtgtatgtgtgtgtgtttgggagtgggaaagagatggcccttcaattccagactcctcattttgggtcttattctcctccctatagacacacggacagcagtcccaagaaaagcagtccctttgaggcggctgggaaaccactcacgtgctctgggaggacagagctgagcctggagcaaggggggaggggaaagaagataatgaatgggcacatccaccctgatctgtgatctgtagctaggattgagcaaacctcagctaaattcttcagaggcagaaagagagagacactcaaagaacaacataactagaggacagggctgggagacagaaggggcaaaacaggaaaacagctcatttctagtaagtgactttaaactcagctgaggtcctggttggttctctggcttgaggaaagagaggaagtaaggagttgcgggagcgcacacacacttctgtgcgtgtggaacggtctcacccagacgacccccctcccccaaaggaaatcgagatattcctctagggctagaggggacaactggttttgtgggacaggaggaaggaaaacggcgacagacagcactccctgtcacttctaaaagagaagagggacaggttccttcacacctagcaaagatcctccgattctggaagcagggggagcggaacttagggtacctctctcccacaactagaatggacaggccagaggacagtcatagcggtttccttaaggctcaccaaaggcaggtaagctaaggaaagaagctccccacctcctatggcccgacgcctggggagcccctcaagagggggctacgggtcgggggaggggtcagtatccccctaaactggggctgggcgggaggaagggctgccctggagatgcttcaacgcaggcgagacaccaggtcctgggacaagcatactcacggcggctccggggcggcggcgttacttggggccggggctcggacgggatccgcttctctccccgccggcggtgtcccaggctccggcctccacttccgcctttcagccgctccggatccggatctccacctccgccccgcccctcaatactcccaggtgattgacagtgcggagaccaatgggaggcactcttggccgacctacccagcggcgccggtaggaacgcgggagtggcggtagggagcgcgcgagggatcgcgggacttgtagttcgcagcgctgggaggagtcagtggctgcctgggacttgggcttagggtggagccggctgactgcgaggcggagcccggccggaactttttttttttttttgagacggagtcttactctgtcgcccaggctggagtgcagtggtgcgatctcactgcaacctctgcctcccgggttcaagcgattctcctgcctcagcctcccgaggagctggattataggcacgcaccaccacgcccgactaatttttgtattttttagtagagacgggggtttcgccatgttggccaggctggtctcgaactcctgacctcaggtgatccgccctcttcggcctctcaaagtgctgagattacaggcctgagccaccgcgcccagcctacggccgggaactttttaaggctaaccctgccatccgcgtcaccgccggttccggacgccccgagggaaggcgggtggtggagcgttggaagaaggcagaggattgtgtgtgcagaattgggaaagaaaaaacgtggtgcgaatgaatatgcacgcgaggcctcagtcctgtgaactcgctgatctggagaagcccttgtctgcactgtccgcccgattgccaggggcgtctgtgattgggaaggtgaggaaagcgctgcaggaagagttctctgcaggatgctgggtgagatcaaagggagagcttctgccaccacctcctacttggtgtgtgcgggggccggcacaaagaccatctctgcctctgccttcccctgctcctagccagggtcagctcttctctctgacgcggaatacagagctggacaacctctgcctcggccctctccatccgtaaataaagactagaaccacccccactctgcactctccccctctatggatcaggaatatttgttttttctgctcctctcaatatggactgggcccgctcctgattcctcccacccttacctctcaacacaaaccagtacctcctcttcttttgcatctcatcctcaagggacactactgaaaacctgtgtggaatcaaagctcaccggagacagctgtggccattgtgcctataacgccaacaccaggcatatcctggagcctcagctggagaatttacctgtcttggacaacctgccacaaaactgtgcccacatctagttccatctggtcatcagggcgtctctctttcttacacccataacacacaatccccacttccgcgccagtgttcatgagaagtgaaaaggaagagggaagagagggcttgttgggaggacagaggggatggggcagagtgggattcctagcaggttctggctggtgacaagctcttcccccagcccccttgccatacccagttctggaacagttccttatacaggagggatgggtagtcccctaggcccacctttccaaggctggaggtgggccaaagccaggactctgtccttcccacatactgtgtgcatacatggctgtgactggggtgcaggggagagaagggggtataataggcccatagtgactaattaagtttcttcctcaaccctggggcccctggtggtgtgaatgtggtgccaagtagattggctggtgcctctgcccttcctagagatagcaactgggccctggggtacaacgaaggtgagggtggggagtgattgctgtgttggctcctccaaagccctggggctctcagagtaacccccagaaacacccagagccaataactacaaaaataaagagtttatttcctatccaaaagtgagcccagggtgttgggtggtagaggagagctggagacctgggcgagttttggagcagtccaggccctgagtgagaccatgttgtaatgggggagaacaggcttggcagcggtctggggtcagggaaaggatagggagtgctgttgggatttttgagttgctagcagcagaagagaccaccttgagagacagcctgcagagagacagaaacagagatgttgacagacccacgcctaggagtagaagcagacattactgggcccaaaaagcacctgttgggcacagggacctgggaacacactgttaggtaaggcagaggttgcaaactcaacccctgggctccaccccggacattccaaattggatgaggcccaggaatctgctttttatttttttatttttttgagcctccgcgcctggcagaatctgcgttttaataggatctcaggtagttctgatggacactcaagttttgagaactcaaatacccacagagaccaaacaaaaatttcaaacaagggaagctagctgggtgtcgggagatgatcaagaaacgtggtgactgcgaagtagagtgcagagcagatcccatctaaagaggacagtggccacccagcccagctgattgccagttattgccagatggaatgttggcccacggtagcctgatgtcctgaggttttttttgttttgttttgtttgagcagggtctcactctgtcacccaggctggagtgcagtggtgtgatcactgctcactgcagcctcaacctcctgggctcaagagatcctcccacctcagcttccagagtagctgggaccacaggcacacaccactacacctggctaattttttaatttgtatagagatgggtggggggggtgtcttgctatgttgcccaggctggtcttgaactcctggattcaagtcatccttccacctcagcttctggagtagctggaaccacaggcactcaccactacacctggctaatttttatttatttatttatttatttttgaggtggagtttcactcttattgcccagacttgagagcaatggcacgatctcggctcactgcaccctccacctcccaggttcaagcgattctcctgcctcagcctcccgcgaagctgggattacaggcatgcaccaccatcccagctaatgtttgtatttttagtagagatggggtttctccatgttggtcaggctggtctcgaactccagacctcaggtaatccacctgcctcggcctcccaaagtgctgggattacaggcgtgagccaccatgcccagcctacacctggctaatttgaaaaatattttgaaaaatatttttcaaaataatcccagcactttgggaggccgaggcaggtggatcatgaggtcaggagatcgagaccatcctggctaacatggtgaaaccccgtctctactaaagatacaaaaaaattagctgggcgtggtggcaggcgccggtagtcccagctactcgggaggctgaggcaggagaatggcgtgaacccgggaggcggagtttgcagtgagccgagattgcaccactgcactccagcctgggcgacagagtgagactccgtctcaaaaaaaaaaaaatatttttataggctgggtgcggtggctgacacttgtaatcccagcactttgggaggacgaggcaggcggatcaggaggtcaggagattgagaccatcctggctaacatggtgaaaccctgtctccactaaaaatacaaaaaattagccgggtgtggtggcgggcgcctgtagtcccagctacttgggagcctgaggcaggagaatggcatgaacccaggaggcggagcttgtagtgagctgagattgcaccactgcattccagcctgggtgacagagtgagactccgtctataaaaaaatatatatatatatattttttttatagagatagggtctcgctatgttgctcaggtggatctcaaactcatggactcaagcgatcctcccacctcggcctcccaaagggctgggattataggcatgaaccactgtgcccagtgctacattttgtagagaaattggaatatctgtattcctatataacctgtctcttttttttattttgagacagagtctcactgtcgcccaggctggagtgcagtggtgcgatcttggctcactgcaacctccgcctcccggattcaagcgattctcctgcctcagcctcccgagtagctgcgattacaggcatgtgccaccatgcccggctaattttgtatttttagtagagatgaggtttctgcatgttggtcaggctggtctcgaactcctgacctcaggtgatccgcctgccttggcctcccaaagtgctaggattacaggcgtgagccaccgcacctggccctgtctcatttttaatattggaactaactcatattttgaaaataatgctgcgcgagccgaagagtacatatctggagccatccgtttgtttcctgtgtgggctgtgggatgaggtgagcctctccagcctgggctcatggtgggcggcctaagaaatcatgggttgctcaaattccaagcaacatctcaaacctacccctctctaggtaacattgctcttaaggtcttcagcagagacccaggggctgagacagaagacctcacaatatcactaagctatcttcaggcaaaatcctacaacctgtctctcttgctatagacgctaagatcctgtctggtcttcccttcatgtcctaggctggagctgggtcccttgcc

SEQ ID NO: 428 - DNA, 8060 bp, Homo sapiens
gtaataaatgtactgctaatgtaaatttcaagtcaattcaacagatatttattctgtgacactgctccagggtaattcagctgggaactaaggatgcaaaaggaaacagagctcaggttctgtgcaggaagaccccacaaattacgctgataatctcaaaatattacttatgaaagtcataagggggttcgctttgagtcagcaagcagacaagcagcataaaaatataccgaaacagtaagttcttccctttgactgaaaaactgccttttaaaagcaaacagcattttaaaagtacagttgctatctggaaagctattgaatttgcgccagaaaccaacatttctaaatgtaaacctataaaataataggtatctgtaaatgaaaggctgaaataaccccaggagcagcaacacagtaattagcaacttttacacagtcataacatgtttcatattctttctgccctggctctttgaagtttccagtgcaatacgtaaaagttttattacattagggcccgtccttgtgtgttttacaggcaccaacattatgcagagcaagctgtacttactcatcataggatcttttataagaaaccgtttgataatgtgctagctttgtgtccagtttattttgttacacctgtctttaggaaaataaaagtcactggaaacctaaatcacagaaaatacacacagatccacatatcatctatatgttataaatcataaagcagtttagctttaaaattgtacattgcatattcatgtgcacaccacttgcagttttagacacatgtgaactctttactgaattaaagcaaaaggaaaaaaaaaaaagctcagctctacaataagcgattaccagaggcagaacagagtgcagttaatatgcttgttccagcagatgttcatccccgtaaatattaaacataacacaagttcctccaggaatatgcaggcagtaattttaccacctgaatagtgctggttggaaacatttaagagatagtggggggttggggggagcagagaaagaagggggaataagacagatactaaagcagccaatgggatttttaagacacccgcaactggaattaaactgcttccagcggcgatttacctacagcagctccccagtgtgagatcccccgagaaacggaacctggagtgccccccgggctgcgagctgtgagcgtggcataaagggatacccggggcgcccgggtggggtggggaggaggagtgcaactgtgacgaggtgtgaagaaagggcccagaggaactgtgaaccccgaggaaaggagtctccctgggctaaggcctctggaataccggcacggagaaacactcgtttcctgccctggatgttcacttttccatctcggtggaagtgggtgggagagacagaaaggatgcagccgagaccgggcgcaggcggggaggctggagcatcctctaagggcacttcgcagcagcaccaactccagggggtcggtggtgccagccggaggagggagggggcgcagtcggagggaaaggaagtgagaggagcagggggccgacgggtggatccccaggcattagtgacacagtcttcaaatcgcttcttttcctccccacggctgcgctctgcccctggctacctagatcaccagtccctgggctggggcgggccgccgcgagggaggggaacaggagagggggaaacagacgggcaggcggccacgcatcccacccggggaggcagaaaagggctggcgaggcaggcgcccccgacccaccccacccccacggcggccggccgcccggagcccccggcccaggtgaggacgcgcgggccgccgcggccgcccctcgccgctcccgcccgcccgaagcggccggcacggggacttaccacagtgactcgaggtcccattcctggagcagggctaagtcgaagctgtccatggtgggaggtgtcagcgtcgccgccgccgctaccgccgccgccgaggctcgggccgcccgcgcgctgcaacgaaaggcgccgctcaaggtgcatcccagccgcgccagagcggccgccgcccgcccaccgcccacccccaggtcggggctcccgacgccccccgcccccgactccgggccggccgggctggctgcagcggccggcgcactcacccgctccccggcttgcgcgcaggcacactcaagagagagcagcgagctcgccgcgccgccgccgccccccgcccccggccctgcgcccgcccctcctcccctccctcgcggcggcccggcccgctgctgcagccgccgccgccgccgccgccgccgcggtgctctgcgcccgcccgcccgcctctttctcctccgggaggcgcgtgtgcgcgggcgaggccgaggcgcgcgcgcaccgtgagccccgcgccgcgcccgccccgcgcgcccctgtactccccgcgccgctcctcggggtcccgcggcgctcgcaggccgcgccgccctgccgcccctctctcgtggcttttacggcccgcccgcccctcagcagccctggggtgcccggggcggccctgcaagcgggagagagcggcgaggcggcggcgccgagtgcggggggatgcggagccgtgcccggccctgtcgcatccctcggccgcccgcccgcgcccggccccgcccggccttgcccgggctgcacgcacttctcccgcggcccagaatccacttgaccctgctgggcgctcccgcgggcggcggacccgggtgggtgcgggggaattccccggccgcccaggcgcggggagagtgagctgtgccgcccgcagcagcgccccaaacaaaccgtttaaggtctctggagcccgcaagttcagcgaaataaagcggcggcgcggaggaaacctcttccacccggacctgctctccgttgcggtttggcctccagtggtggtcccacccaccctctagctggccagccctggaaaccaacctcctttctttttatttctcaccgggaagggggacaaactggcctctgggtgtcgacttcaaacttgccgcccgtctccggtctggaaaggcaggtgatcagctagaagggtgataagagtatcatcgtggctcctaaagagtaataataatctccctcattgtaaagacagctcttccccctggcttacttttttagacatgctgagaagcgcatgtctccatcagggccctacctctgcttctccacagttggcctagaaccggaagcccctccaaggccccctgactctcctgacctcttggccacagctccggattctcaccagggattccccagaattcctagagagcagctcagagccctgcagttgtgcctcaccacgcgaaccaaacctcgcactccccgccaaaagggagtcccttccagcactctcccctttgttcctttttctgggcaagaaccgctgactggggctgccagaaatgtaaaccctgggtgcaagtgacgggatccctccagcgtcaagccgaagagtcatcctctcacctcacccacctccgaatgaggattaacaaactcaattcaggacacaggtagaagaccaaaaggccaatgagacttctttcctatttgagatcggatttgagaatgctcagcctggctcccttcttcccccagctctgaatcaatcctttcttcattagcatccataactaatgtgcaaaatgtaaaacgctaaattaagacagagttggcatcaacatagtctgagaaaatgaaattgttattttacaagctgataactctcagccctcaaaaacccctctcattagctgaaggtagcaagtagcaagaagattaggtaaaaacatagagaatatgaatataggaaaaagtacaggtgtgaagggctggctgcccaaatcccaatgcacagtgtatttggaaaaagaaaaaaaagaaaaagaaaatctgtctttctaatatccccttagcatacgccttgttggaaatgtttgctttggcgaaagtgagatcgagacattgagacagcattcccaggaacaaaggctgggggtggagggtggaggagggagcaggaacagcccctgtctggaagaactgcaagttctgaggcctgaacaagaaatgtgtcctgttcccgtgctcctggctgcagctgggaagcttcttcagaaaggagacctcccggccctcaccgggatctggctttccttcccttcccaccacatctgtttatacaaaggagggccgctgaaggacaaacataaccgtgtttactgcgagtcccatgctgggcctggagctcagatacagatttgccctcaccatggaggctgaagataaatagatgatcccagaaaaggaaagagggaaggccctgggatggtatagagctggttgaggggtttactcatgaaaggcctctcccaaaaagccatgtagtaacgggcagatttacgtttgaatttaaactctggtgccttgtgttaatatatgagagtgtgtgcacctaaagcaattgcaaggcgggtatttaaaaatgtttctttaggaatagccatgattttctgtttggggcctctaacatggggatagttggattgattatttccagtgttatgttttcatgtaatagtgtcttggagaatgaggacttttgaggaaacccaaatagtagttgcagatcctgttttttactaagctgtcatggagataaatccaaaatagtttttacaagtaaaatgtagaacagttagtgagagcctttatgggagatctttattatttatctggtttatgaagatgttcctattatcctccagcctctgggtatgcaaaccaaaacaagcacttaatctagttgtcaaaattttaactccttaatacaaagcaaaaaaagggtttggacttttggggattagaatgtcagaactaaaagggaacttttttatgtaaaagagaaagagactctctaaaaataaaaatgttagagtgatgttttctatgaagctgccttagcttttgctcatcctatagtgcttgtgacctgagggtcttttctccccacatggatgcaagcaacacccctgggagctgaatcaaaccacccagctaaggggagggctgctgggggaagctgctaaatgagaggagctgcttggcttcccgggtcaggttggttggttggtgtagactaaatgtaccaaagaaagggactaacaaatgaatcctgctcagtctggggccctactcacattctgccaacctagtgctggaagcctcctaaataaatccagaagcaaacctatagcatctaagatctcccttcagatatgatttgatagaagagaagccttgcatggctttaattcatgccttatcctgaagacgcagctgcaactcagaggtcatttttgtaaccaagtgggattttttttctctctttataatcccaccattcccctagaaaaatatgtctggccaaaagctggctctgcaggtggtactgctggaaggtgataggagcatcatcaagctgcctcagcccctacagcatctcctccagctttgtccctaaggacactactctctcctgttccagcaaagctgcagacgcatgactccatctgcttctccttccagaggcttcttgggtgtttgtaactgtatccagggattgcaggataaaccttctaggctttctccttgcaaattacatgctaatatgttgaaccccaggacagcgtagattttagatccacccaggagttcttgtgtcttcaggcctttccctctctctccacaggtatctctgagtggttctaacctaggattcgaggtgcctttctttctgtattttttcatcattcaccaggtcccgagcagatggtgtggctgtgctgactgtcatcactcctcctatgtttccatggaaacatggggcatagggaccatctccgccttgggctctctgacagtatcctctggcgaagaacttcagtacttgtgcccctccccccagcctgtccactgtcctagggagttggagacctttctggggccctagaagccagggtcatttcagagatcatctaaggacatactccctgcaaatggttttgaactggctgggaaaaggagggagggtagaaagggggccaataccccggtcgagggctgagaactgttttagaaggcaacatatttggactatctgtccctgcagccagcttccataatagctgattattgcccagatgtcaaaagagctgctcctagggttcagtctgctcatcagacaacagatatttattgaatgtaagtagttgctgaggttttatgcttcactgacattctacaccctgggaatgagtgtttctgggaatgtgcatttctttcctttttttttttttttttttttttttttaacaaaaccaggtttttccctaaggaatgcaccttccccaaagtttcccgcatcctcctgcctacataattcacttatatagtcactatgacattaattagattcagaagtctgtggaaacagcagagctcggcagggtcagagggcaagcagggcagagaaaagagaggggaaaatgagctccgggagaggggaaggaagtggagggaagtttttcatgcccttcaagtaccaaacaaaacaaagataatttcaaaagtggtcagccactataacactgcttagagaattaaagtattgacaaattgaagagtgctttaaaataaagtggatggggcataagcatgtatgtcttggtgttagttgctccttatacagccggtactaaaggctggtgggtgaagcttaccacattttaaaaagaaaaaggcaggcacacatactaaagttgaaaatgcaggcaggaaggacatttacttttcataaaagcggatcagaaaagcatctcctatcacagatcatgtattttatgccatgctgaccaatgttgggggataatctcattattttgtgatatgagaagatcctttgatgctggtaacaagaaccaatcatcctgacttaaatcttaatatccccacaggttctttgtcatgcttcttcaagatgtgccctggccattcatgcaagtttcaaggactctgaatctgttgagaataggacataactaatcgtatcattagcaaacatgtctatattactgtcaactgggtgctgttctaaagtatcaactccatttagtcctcccaaaagcacatgaggtatgttgccattgtttttattttgcaggtgagtatgctaaggaacaggtaagtgtcacaaacccaagcatggcagatcaggaattggtatggtattactggtagctgtgataccatactccacctcccacaacttttgccttaattatctatagcattggcgcattctcatgctcacaggcactgaaataatgaaagtaatacagtcccagtcggaaggcgagagagagccctctacccctctctgcaattctcctgccacccagttttgccccttgagttctgccataaccgcacctggagtgaggcgctccttgtctctagcctcaacgtcttcctttgcaacatgagaaggctggattgggtgttctttgtctctgtcagtttttgtctctgacagttctgaaatgttagaggtctgtttttttcagttgttcttcctgagcactgccagacaggaatccctggagtatgtcaagagagtcataaaccttttcttgtttaaaggtaggacctccttcttggcttaaacaaatctcaaggtgttggtctgcttcaaacaggagtgctgtgctatctgtgaagtattagcagacggcaagaggaatgtgttcaggaagaggacacttagcttaggtctgggggaagcatggggaagaagtcacaacacaactgtgggtgtcaggctcttttctctggggcaccagagagtattcaagcatggattggtagtccccatgcagccctcggaggaaaccgaagctgcaaatgcagcaattatggcttacagcctgaaaatg

SEQ ID NO: 429 - DNA, 8060 bp, Homo sapiens
ctggggctagtgtgcacaggtttttgtggtcttattgtagggaactccctgcagtaagcatcaaatctaaatcagtaaacaaatactagggttatagagatcgagaagtgggttttgattttcagccttttggatctagatctctggaatcgagcagaaaattcacaaagcatttgaggaaagtgacccagtttggctattttccagcagtaaactctcccaggtctactttgcatggggtgaactttaggggtatattatgctttttcctcagaagagacattggagagtgtacttgtaaaattcagtttatttgaaagctctttcttcaaaaaagagaaacaaacaagcaaacaaacaaaaattcccagtctgtagttagtgaagaggaccttaagaacagccaggaaacaaaaactaatctcaaccctttgcacaaactattttttatctcctgggaaacaggcagattaagtgtgaaggtgcaacaaataccaaataccaaagagaccacttctttccaagtgtgctcagagttcagtgtgtagaacagctgcagaaactcctgggcccacagcactgcatggtttcaactttcattgcagggaaggacacgtttctatgccttacagagacttgaagcctgaaagcctggccaagtttgggaagaagaggagccctctcagagctcaagagccttcctactctttggaacttttccacagtaggccaagcttgacaagagttcagctcaagttgaacatacatacacacactctcacacacaaattatgtgagccgtcagaatccaagtgaatccagctcaagctatctacaaggtttttacatgcaaggtcaagtatctcaatccagaggacttttgttttcttaatgaaaagcttagaaaacacatgaatcttagatttttaatgttttttaaatggagtttattcttagcacatggctttctatgtagccacatcacaatttgtacagttccacataagtctaaatgcactcccctctccccaaagaccgtgccccagaaggggacaacagtatctctgtaacagtgtcttaaataaatgcaagtaagaaaaactaacatgtcacacctaccatcaaggtctacacatcttaagaattaaataatcttgtgaggtccacaatgtctactcatttattcagttaaatacaagcttggatgagctgccttaatgggggaagaggaggtaaggaaggtggggaaagggtctgtcttcttctgctttcaacaaagatgcaagtgtatgtccccactcagcatgggctgtccagctagctgactgtagccatctcaaaagtatttgataccaagtagtccttctcaggtatccacacctggcagccttgtttcgggccagcaggttgttccaccagccagcatcctggacaactgttctctcttgggtggcaaccagcacagactcttaaccggataatgtcttctttttgattattcttttcaccaatttgggtttgttttggtgtctattatggtccagatggggaggggtggatgaggaacggagcaggagaagagaagagaaaagcaggtaagggatagaaactggttaagatctctagaagattatatggaggagggaacgggtgtggaggtgctcgggtgggggtggggatggaggtgtgggctctgagtttgtgctttccctggtgggccggcagaggccgaggccgaattggaggatcgcatcttggtgttgggcagtttgtggtctttcttccacttcatcctccggttctgaaaccagatcttgacctggcgctcagacaaacagagcgtgtgggcgatctcgatgcggcgccgccgggtcaggtatcgattgaagtggaactccttctccagctccaagacctgctgccgggtgtaggcggttcgagagcgcttaggctcccctccgttataactggggttaactgaaaacccagaaccccgaaatagaaggccaaggaggagggagcggaagagagggaaaggaggaggagagagaaggtggggtggggaagagcaattggacatcatcattatataataacctgacaccaagttcacgcaagatacataaaacggcaaagaaaatgtttcacaggctattgacaacgggaaacacccgagagccataaagaatggtgctgggcattggggctgaagaaaagcttcaaagacacatggcctgaagcctctgccagggcaattaaatttatgggggctataattactgccctaacagtttggcgtctcgtaaatctcctgataaagggaccctgggtacaaaagggttctcatgttgggatcaggcggctggctggcgcgcacatacccacatctcaccgcagcccgggtcagatgggggctcccctcccgaggcccccttcccctgagcctctccctcctgaccccgaccctcgaacccaggcccagccccggcccacctcccgcgcctcccaagcggcgccacgtaccggcgctgacatggatcttcttcatccaggggtacaccacgggctccttgcccttcaggcccagcgggctcttgtcggccaagagcagcgggcacgcgggggcgctgccccctgccgggacgcctggggtggcgggggccgcctcgcagcgccgcggggccgctgggggcacggcgcgaggctgcaggggcggcggcagctggggctgcaggacgtggctcgcatgcaggccgtgcgctgggcccttggcttgcgccgggggctgctcgggctggggcggccgcccggggctggcgccgccgcggtagccataggggtaggcggtgtccgcggccccatgcgcggggtacagcgcggcagcagggtaggcgggctcgcgggcggtccgcggcgcgtagtaggaggcagtgggctctcggccgccgcccgcgtgagggagctggggctgctgcagcggcaggtgctgggtcgggggcgctgggggctgctggtagccggggcccccgcccgggccgccgtctgcgccgcccgagccgctgtgctgcgcgtactcctcgaagggagggaacttgggctcgatgtagttggagtttatcaaaaacgagctcatggtcattaatttgtgaagtgcaaaaatactaatttttctcgcgttgtcgttttttctgggcttgccgaggcccctccccctcctgcctcgcttcccatccccctttcctctgcgcccttcccctccccccgctgtcaagtgcccactcctccccctcccgcagacgccgccaccaaagttcgagccgctcctccccagcccagcgcgcgccccgccccgtgccccacgtgcagcgcccccaccaatgggcgcaccgcgcgcgcggacccggatcaggaaacgcgcgggtgcgtgatggatgctgctgtccggcccctgggctgggggagggagcaggagctttggaccccagccccccagctttggttcccgctgggaattcaggccctgtcaggctgtaggtcctctcgggagccctctgcctgccctactgctggcctaggcctcgggctgtctggcggccgcgactcagcgctgacctcgggcgcaacccagtcaggcttcgtgtccttcaggggttctaggctaacaggcgaaaggaagggcgttgggaccgaggggcatcctggtttttatgtacgccactgagaggccaccagacacattttctcaaccgcagatcccccttccccacaccctgctccttgcgtgtcagcctgagagcccttgctttgagaagcttggcagaagctgcaaagggtgggcgggcagctaagagaaatcgacccaaggatgtaaatcgaggccattccattataactggatggacacttttcattttttccttctttcagagacaatctgtttcgtgttttcctaagaaaaattggaaccttcgtaatagcatctaatttgacgggggttgtcgatgtgagagctaaatatgcccgcatttactaggtgcgattgtgagagagaaggtggcccaaggatgggaatggatagaagcaacacctccacagaaccgagctttgaaaacaataacttcctatttcagaactatccccaaacaaaaacaagctaagggtagaataaacaccttgccgggtctgatcgctgatgggtcttttccagctaagaatttcatgttttctcttttagatcctgctttctcaggcagtatctgaggctagagttatatttgcaggacagtctataatttctgaattgctgaaaattagcgtattaacgatatcagaagctccggaaaggagggagaggagactgttgcctgctatttggtaattgaaatttgatgggtacactaattacgccattattaacaaataaattacttattaattccacctaatgttgatctttgaagtaaatactgatgccttatttgtgctgtgtgctttctccctttcttttctgagtagtagacatatctagatcctctacttttcagcctaaattaaagcagtgtaaactagcatagtcaccattctaaaaatattttcatattggcatgcaaaagcaaggatttttcagctggtgcaccttagttgatttttcaaagagcagtataaacagccttctcacaactgagtctggaacgcagacaaggaaaattatttcctaagcctggagacacttgaaaaggaatgtcaattctatcttcattcatactggttactcatatgagttactaaatgctggaatatatccatttgatggatagtcacttaatgcttagccacataaagcctattatatgggactaatctttaaactaatttaggaaaagaggttaaaaaggggatcatattagctttctaactggaatcaccctgaagaggtacaaagagattttccacgttaggtgtatatgagtgtgaagagtgctgtccattcacatgaggcaccctgaaaatttgtttttaaagaaatttgagccacagacagaaatcaacactgagtgtaatctttagccatcctctctagactggaggaaaaatttagaatgtgatacatctacctgaaccaatatctctccctagcaagaaaaaataatatacacataggttatataaaatgtaatataaataatatatagacatacgtattacaaatctgaaccctataagtttcagggggacaaaaagcatgacaaggaaatcttccctccttctcatgtcatcagccttgagtactagggtcttaaccatatctgtttaatatttacagacactaaaacacaaaattctgttgtttagcctcagaaccttgtaccaagtttctatttttaagtattaacgagacataaacactgttttgtatacggttaacccaaacgagttagctgtgcctgtgttttgtgtgattctattactttaggaagatggccttacacagaatcccccaaggcctgtaacttgtctttgtggttcgtatcataaacacaaacggagccaggaccaccaagtgttatctcaacaccgacattttgacattttactgcaagatttatggctgtaataaacaatctcagtaccttttctgaaccttcctcaatctccctttgcaaaccatagcatcattccattgaatcaaataatcttttgaaaaacatttaaaaaaaatacctcttgcctttacacaatatccaagacaccaaagtaaagccaggaagaaactaactcaattaataaacaaactgaagtttaccagcagcatctcgcctgagaaaagatgggatgccctgaaatgtagcagagagggagcatgctaatcctcacacaccaactggctccagtcccaagcggggtgaaagcgttatcctttccttaggaaactggtgagcacgtttgctcatttccacgtgcagggataacatatattcccaacaaaagctttcttaaaatcccattaggtgaaataacttttcatcatgtcctcgaatcccagatggagaagagtgaagggagtcggagggagagggagggtgcaagggaggcaatgttttgcagcttggtttgaatctgatttgaatcattttgaatatatttgtaacagcattccctcttgaatgcaaccctgtcccaagtttcaaagtgaccgaacagtgacaccgtgtgcattttgtttcttattaatcttacacattgacagtctttgttaaatcacaaggcgcgcccttcactagccgacattttcatatttgttagacgcactgacctgaagttcacctcggccttggactttgcgcttctaaaaggtctatacagtgtcttttagagagcagggtgctttgcccaggtcactccttctcaggaaaaaccaaggggaaaagccaaaggaaatgtaaacgttatggaatgtattgactgtatttgtcctttgttctttagagcgagagtcccccagactgttctctatctgatgcatgtctctagagctgaacagtggaatggcagaatttcaaaacgcctgatggtggcatttgaaggcttccccaccacctacactagacacaagatttgagaggaacaacactttaccagccatttgaccaattaattctttggggataattttcttgtagtagtttaaaataatgcacacaacgcagggatgaggactgatattcatattgggattacacatgaattttaactgggattgtttgagaggcctgaggttcaaaatcctccagataaagcaagcacactaaaagcaataaattctgcaagtactcttttcttttactttgaagactagctaagaggtatctatggtttttgaagctgacatgtctataaggtgtgtcacatgtttttaaccaaaaagcacaataaaaaggtttttcccaaagagacacgtaattgtcttgttgactcatcgaggggtttcagttttcctcatttcactagcccaaatgtggtgaaatgttcactgctgcaacagcaatcaccacagttgtttcctttcttctgtttcatctggcaaacccccatttggcttcaagctcttggccagagtgaaaactttacacattgcacagaagcaccctgattacttccatgaaggcagtgtttggaaaatatttactttaccactgaacatacctggcaccattaaatccaatcaaccaaaatattgggatgatcttaaacattcctgcaagagtccacattctgagtagatgaattatttccaaagttaaaaaagaaaaacctagggaaaatatttcacttttctcttctctgttttcctatactgatcccttgaaggtcaattcatagaaaagggaaatatgtcctctggaaaatagattcttacagcaccaacacttaaagccattctagatgcatgaaaaataaaatattgtttagctcttcagttgcaactcacacatgaggcatggttctagtcggcttccttaatacactattctctttcttttctgctctcccacccttcttcttaggttgctttatcttctccttggcttttttttttaattccacgtgtatcattaaaaagtacattctgaagaatagaaaatattctattctgtcctggtggtcttacagagtagcctgttatttgtggatttcacctttctgcattccctacagtctagttattcacttatagcttgtagcatttctcttacattcaattgtggtttaataataaacattaaaaaaatttccaaacaggaacattttcatggcaccagtaagcattttgtcactggcagtggtggtggaaggggtgaagggagaattctgtgtctttcaggagggtttccacttccttccttccccttctcagatctcagaacgctttgcattcagcggactgtagtttcagaaaaagcatattctgtgtttgaaaactgcaaagattatattttgcaagaagtgtctgtgtttgcatttattcttacacactttaggggtcatcatgtgtactaaaa

SEQ ID NO: 430 - DNA, 8060 bp, Homo sapiens
ctgcttaaagcatactttggttaatactaatattactcattctgctttcttgtgtttgctcattctctcagactttctgaaatagttgacttggatgaagggctccttccctctgtatcaagatcttccttttcaaagctttcagtatgtgagaaaaaattagggcaggcaaggtggctcacgcctgtaatcccagcactttgggaggcctaggctggtggatcacgacgtcaggagatcgagaccatcctggctaacacggtgaaaccccgtctctactaaaaatacaaaaaaattatccaggcatggtggtgggcacctgcagtcccagttacttgggaggctgaggcaggagaatcacttgaacctgggaggtggaggctgcagtgagccaagatcacgctgctgcactccagcctggatgacagagtgagactctgtctaaaaaaaattaaaaaaaataaaaaaaaaatagagtgtaatctaacacctagaaagaacagtctacaggccgggcatggtggctcacgcctgtaatcccagcccttggggaggctgaagtaggcgcctgtaatcccagcctttggggaggccgaggtaggcggatcacctgaggtcaggagttcgagaccagactgaccaacatggtgaaaccgcatctctactaaaaatacaaaaaaaaatctgggcgtggtggtgggttcttgtaataccagctactcaggaacctgcggtgggaggatcccttgagcctgggaagtggaggttgcagtgagtcgagattgtgttactgcactacagcctgggcgacagtaagactctgtctcaaaaaaaaaaaaagtgattctgtttttcagtttgtcttttgtctatctcacacacttttgtctctgctcttccacgtatatttttatctactaattttcacctttgaatgtccctcttttgaagatgggtgagtggggcttccagttttgtaagggatacttgcgttatgttaggatccagcctaacattttcaggagggtgtgttttggggaagaggtgtgcgtattaataccacaagccagaggatgactctagtggacatttgtcagactttgtggcttccaagcatctgggcccacttccaaagtttgtagagtcccctaatttatggatgttgttgggaagagagcccacctcccactatagaaataagtacaccagaaacttgcttctgagtgtctctttcagctagaatgagagcaagtgacaggctctctgcccatcagatatatctgccctgcatttgacacagagaaggggagacaaggaggaacttgctctgtcagtttgtaggcagccattgtagggacatggattcctggagcgtgacgacagtaatgctaggggtagcagcgaatgtctgtgagaagtacatcagaaatgcaagctgcagcatctagtgcttggtggcagcagcactggtgtcctcactagctggcttggagtcatgatttggggcactgttaacagatgaatttttgttgttgttgtagttttgttttgttttgtttttgtttttgtagaaacggggtctcgctgtgttgcccagggtgatgttgaactcctggcctcaagcaatcctcctgtcttggcctcccaaagcgctgggacttcaggcatgagacaccacactcagccatagactcgtttgttagttctcctaagaaacagagccaacaaaatatattgctaaagggtgggtggggtgggtgggaaggtaagattttaaactctaaggaattggcacatgtgattgtggaggcttggcaagttcaaagtatgcagggtggaccagaaggctgtagacctagcgaagagctgatgttgttgcagcttgagtccaaaggcagtgggttgactttttctattgtggccttcaactgattggataaggcccacccacattatggaggctaatctggtgtactcaagttctattgatttaaatgttaatctcatcttaaaaatactccccaaaaagaaaaataagaaagaaagaaagaaagaaggaaagaaagaggaaagaaaagagaaagaaagaaagagagagaaagaaagaaagaaagaggaaagaaaagaaagagaaagaaagagagagagagaaagaaagaaagaaagaaagaaagaaagaaagaaagaaagaaagaaagaaaagaaaagaaaagaaagagaagaaagagggctgggcgcggtggctcacgcctgtaatcccagcactttgagaggccgaggtgggtgggtcacgaggtcaagaaatcaagaccatcctgggcaaaatggtgaaaccctgtctttactaaaaatacaaaaaattagctgggcgtggtggcgcgtgcctgtagtcccagctactcgggaggctgaggcaggaaaatcactcgaacctgggaggtggaggttgcagtgagccgagattgcgccactgcactccagcctggcgacagagcgagactccgtctcaaaaaaaaaaaaaaaagaaagaaagaaagaggcgccaggcggggtggttcacgcctgtaatcccaccactttgggaggctgaggtcaagagatcgagaccattatggccaacaatgtgaaaccctgtctctactaaaaatacaaaaattagctgggcatggtggtacgtgcctgtagtcccagctactcgggaggctgaggcaggagaatctcttgaacccgggaggtggaggttgcagtgagttgagatcaaaccactgaactccagcctgatgacagagtgaaactccatctcaaaaaaaaaaaaaaaaaaaaaaagagaatgggacagagagaaggtgattggatttatacattgtagccaagcatgtagtgatagctttgctcaatcctggttccaaatactctggttcaaccagctatggtgaaggggaggtggtagaaacacgactcctggggctccaccacattgtgcctatgcagattaggaagctctatcccaagaaaagggcaaaccatgtgagttgcagggacatccccaaagatgtccatcctaggggtctagagttcataaatcacggcatcctggattctcctggagaaaacctcccttacaatcagactacccttcatctcaaacattttctttttccttttttttttttttttgagacagagtcttgctctattgcccaggctggagtgcagtggcacgatctcggttcactgcaacatccacctcctgggttcaagtaattattgtgcctcaccctcccaagtagctaggactacaggcacatgccaccatgcctggctaatttttgtatttttagtagagactgggtttcaccatgatggccaggctggtctcgaacccctgaccttaggtgatctgcccaccttggcttcccaaacttttgggttacaggcgtgagccactgtgcctgaccccaaacattttcacgaattaagcccatctcagtaatgtgctcgtaacattccctcctgtaaaatggaaaacacgaagcatcactaatgtcttaagatgaccaggcagaggaaagcaagggctacacagaaaacacggaagagccccatatctcaacaaaggaagtgatactgcaaaggatttcatgacagaatttccacacctgtgggcacaggagcagatcacaaggtgaggaggtttgtggttccaaggaatcttgtctgcgatttatctgtatcaggatggcttcatttctaatatctacaagttttggtccaagagttttatctaaacgttagataatattgaatgtcgtcgttgtttggtccaaaggggccaaaattaggtgggacaattatgttcttcttgtccctaatgaggctctcagggaatctggtcccagtggccaaaggaggttcctacaaatgcctgctctgtgattgccccaaacatttacttacacagaggactaagaccatgagcccctactcctcacacactcaggacccgcctgtgtttccaagacattccaactcccacagtaagtagaagcattgaccagttatgtagaaatgaggaacaactgagagtgacagcaccaaccttctccaggaaaggtcgcagaggtgaacaattaagtatgtgttggctcagatgtgaagttcttttaggaatcttctttgctacatcatccagatacaggaagtaatgagtaatgtacagagaagtgaagtacaggagtcctgaatccatcagttgtcacttgagattaacccagtaatcatcagtcattcctccagtctctttatgagctgctaactagttgggtggggaactgaatgtaccagagacacacacattctcagagtcaggctatgtgtacgtgtctgtgtgttttgttttcttttcttttttaatagagatggggtcttggtatgttgtccaggctggtcttgaactcctggcctcaagccatcttccctctttggccttccaaagttctaggattacaggcatgagccaccatgcccagcctgtctgtgttttcaacgttaaatatgcaaaataagaatcagtgagtcgtctaggaaaagcatcgtaactgagtgttggaaattggacgtatgggtgaggagaccacatcctgtttttgcaagtttgtgaattgatttgcaaacgtggttcttcctggagcctcatcacatcttaaccacccatgtgtatgtttctgaattcactgtcttctatgcagctgggtccagacatatgagagggacaaaccagtgagtgtctccgagttcctcctcttgggactctccaggcagccccagcagcagcatctcctctttgtgttcttcctcagcatgtacctggccactgtcctggggaacctgctcatcatcctggccataagcatagactcccgcctgcacacccccatgtacttcttcctcagcaacatgtcctttgtggacaactgcttctccaccaccgtccccaagatgctggccaatcacatactcaggactcaaaccatctccttctctggctgtctcatgcagatgtattttatcagtgagcttgctgacatggacaatttcctcctggctgtgatggcctatgaccgctttgtcgccgtgtgccgccccttacattacacagcaaagatgacccatcagctctgtgccctgctggtcactggatcatgggtggttgccaactcgaatgctctgctgcacaccctgctgatggctcgactctcattctgtgcagacaacaccatcccccacatcttctgcgatgtgactcccctcctgaaactctcctgttcagacacacacctcagtgaagtgatgattcttactgaggctgccctagtcacgatcaccccatttctttgcctcctggcttcctatatgcacatcacctgcgttgtcctgagggtcccatccacaaagggaagatggaaagccttctccacctgtggctcccacctggctgtggttctcctcttctatggcaccatcatgtctccatatttcagaacttcatcctcccactcagctcagagagatatagcagctgctgtgaggttcacagtggtgactcccgtgatgaatcctttgatctacagcctgaggaacaaggacataaaaggggctcttgtaaaagtggttgctgtgaaatttttttctgttcaataatggtataggcttaagaaagtcctagaaggagctaatttctgagataatcgtttattttttctactgtgtgaaacttagcattgtttgtttgtttgtttgttttgagacggagtctctgtcacccaggctggagtggagtcgtgcgatttcggctcactgtaacctttgcctcttgggttcaagataatctcctgcctcagcctcctgagtagatgagattacagatgtgtgccaccacaattttttttttttttgtatttttagtagagacggggtttcaccatgttggtcaggctggtctcgagctcctgacctcaaatgatccacctgccttggcctctctaagtgctgggattacagatgtgagccaccgcacctggccagcatttgttttcataatagaaacatctggtatctattttgggagaacaaaaccctgcatatagactctttaggttaaagatggaaagagagatcctttaattaaatgacccgacaattccaattgtcaatgccctcctgccaaaacctagaaggaacacacctgtagttcaataagttggatttactaattatataacaagggagaatacacagcatcagcatcgggaatagtgaggtgtctcaatagaagagtcctaaaaaggacttctgcttgtgtaatgttggtgaggaaataggaatgagtctgtgctctggagtagatgccattacagaatagagataattctgaatgagtatcttttttttttttttttttttttttgagacagagtctcactcagtcgcccaggctggagtgcagtagctcgatctccgctcactgcaagctccgccttctgggttcacgccattctcctgcctcagcctcctgagtagctgggactacaggcgcccgccaccatgcccggctaatttttttgtattttttttagtagagagggggtttcaccgtgttagccaggatggtctcgatttcctgacctggtgatccgcccgcctcagcctcccaaagtgctgggattacaggcgtgagccaccacgcccggccatgaatgagtatcttaatatattttatctagaaggaaagaagaggccaaagctgtgattgccaaagaaatagcagtcactcatatcaaccaccatagggggatgtttggtgatttttgtggctatgaccatgttcctgtttttgtgttgagacatcattacagaaaggtcttgctttgttttgctctagcacagtcagtgtggccttatctgataccgatgttctgtgaaattctctatgttgatcaggagaacacaaaaaccttgctgtgagggccaggccaactcctgtcagggttgtttactctttctcacaacagagaccttgacatgaacacatctgatggaaagatcagacatttgttgggacaggaaggggaggattgattttattttattttatttgagacggagtctcgctctcttgcccaggctggagtgcagtggcgagatctcggctcaccgcaacctctgtctaccaggttgaagtgattctcctgattcagcctcctgagtagatgggattacaggtgcgtgtcaccacgccaggctaatttttgttatttttagtagagatgggttttcactgtgttagccaggatggtctcgatctcctgacctcgagatctgccagcctcggcctcccaaagtgctgggattacaggcgtgagccaccgtgcacggctgaagggaggatttatttagcgttccagaaagccctaattctgccactcatttgagctatttttattttcttatctaacctttatgtatcacacattacagcaggaatatgggtaagttaaacaagaaaaatatcttccacagtcccaaatatccagccatatcaatcaactacatctatttttttacactctgttctgtgtcaatgcacatatatatttttatttagatactgatttatatcctggtttttcacctttcattttataataaagcttttccaaatcactacatagtctccacaattttatcttaatactttatatgtctccatcaagttctctagcaaaagactcttactaataattctatttctaaattaaaacataaaggaaatttactatttaagagcgtgatttgaattttatttgtaggccaggcgcagtggctcacgcctgtcatcccagcactttaggaggctgaggtgggcggattacctgaggtcaggagtttcagaccagcctggccaatatggtaaaaccccgtctctactaaaaatacaaaaattagccgggtgtggtggcgtggtgcctataatcccagctactcgggaggctgaggcaaga

SEQ ID NO: 431 - DNA, 8060 bp, Homo sapiens
gcttgaagccaagactttgagatcagcctgtgcaacatagcgagaccccatgtctacaaaaagtagatttttaaaaagcccggtgtggcggtgcatgcctgtagtaccagctactggggaggctgaggtgggaggatcacctgagcccaggaggtcaaggctgcagtgagttgtgttcacgccactctactccatcctgggtgacaaagcgagacactgtctcaaaaaaaaaaaaaaaagcaaatctgaggctggcagagatgctaagtttagattccagggggcaggactggatttttaatttcatctggctcctgagtcctagctcctaatccttgtcactagtgactctcagatgggacttataaattatatataagatatcagtcatcagggaggctaatacggctctgggaccagaatttcttgtttaccttttttttttttttttgagacggagtcttgctctgtctcccaggctggagtgcggtggcacaatctcatctcattgcaagctccgcctcccaggttcacgccattctcctgcctcagcctcccgagtagctgggactacaggtgcccgccaccacaccccggctaattttttgtatttttagtagagacaggatttcaccgtgttagccagggtggtcttgatctgacctcgtgagctgcccgcctcggcctcccaaagtgctgggattacaggcgtgagccaccgtgcccggccttctttactttttttttaagagacggggtctccgtacgttggtcttgaactcctgggcacaagcaatcctgcagcctccgcttcccgagtagctgagactacaggcgtgcaccaccacatccaactcatttttccatctactttttgtagacatggagactcgccgtgttgcccaggctggttttgaactcctgggctcaggcagtcccaccacttcagcctctggagtagctaaaactgcaggtgcgagctggaagcagcatttctagccagtgccacagtccacgaacagtgtgtgtatcccccaaagcccccacttccccaaactttgccatgagtctactggactatgctctcttcctccccttccaggtgaacctgaacaccatcaagcgctgcctcctcatcgactacaaccccgactcccaggagctggacttccgccactagtgagtgtcccagcaggatgggagacgagggggtgccgggtgggggcctccacatgcggctgatgacagcacttctgctgagacgctgtgattgctctgtccaaagtaaacgccctgacgcactgtgggaagggtgagatgggcaccgccagccccatcacgtgccccctgaccacccccttgccgtccactcatgttcctgcagtagcatcaaagttgttcctgtgggcgcgagtcgcgggatgaagaagctgctccaggagaagttccccaacatgagccgcctgcaggacatcagcgagctgctggccacgtgaggagggcatagggcgggaggccactgcggcccggggaccccagaacaggaccgggagcctgagctcccccactgagccctgttatgtcctacacacaggggcgcggggctgtcggagagcgaggcagagcctgacggcgaccacaacatcacagagctgcctcaggctgtcgctggccgtggcaacatgcgggcccagcagagtgcagtgcggctcaccgaggtgaggcccagggcagggggacccccgggctccaccagtcccaacggtgggctgacgcttcttcctcgtcccctcagatcggcccgcggatgacactgcagctcatcaaggtccaggagggcgtcggggagggcaaagtgatgttccacagttttggtgaggccggggccgccgggggtggggggtcatgggtgtggagctgcacccggatcttggtgacccgcgtctcttggctcagtgagcaagacggaggaggagctgcaggccatcctggaagccaaggagaagaagctgcggctgaaggcgcagaggcaggcccagcaggcccagaatgtgcagcgcaagcaggagcagcgggaggcccacaggtccaggcagagctgggaagggcagggccaagggggggtccctgggatgggcggctatgttgacccccacgccctcctccagaaagaagagcctggagggcatgaagaaggcacgggtcgggggtagtgatgaagaggcctctgggatcccttcaaggacggcgagcctggagttgggtgaggacgatgatgaacaggaagatgatgacatcgagtatttctgccaggcggtgggcgaggcgcccagtgagggtatggagtggggtctgcagcagggcacccagagcctgtccttgtctctgggggccctgacactgtctctccccacagacctgttccccgaggccaagcagaaacggcttgccaagtctccagggcggaagcggaagcggtgggaaatggatcgaggcaggggtcgcctttgtgaccagaagtttcccaagaccaaggacaagtcccagggagcccaggccaggcgggggcccagaggggcttcccgggatggtgggcgaggccggggccggggccgcccagggaagagagtggcctgagcccaagccgcaccggagcagcggctggattgaacgccccagattggggcccgagatgtggccctcggtttcctttcataaaggagttgtgtccccagcccttccactccagtaaagaactgaattggccaggggtccacgtcagcgtttgggatgggggattctggagccatacaaagcaacccagagagtcctgggccggccacacccgagagtccctcccacctggtttcttcctggaagctgggtctctcccctaccctgcacggggttggtttcattggtggcagcagcagccatgagtggcccctccccccagtcccaccaaagagccgtgcaagcagacaggtcacactttcagcagatgagcttgaacctcaggagggttgtggcacaatgaggaaggaaacgtgggtggaaaggcacgctggcctgctctgctggctgggccagtaactggggatggggctggggcagggcccactaagccactggtgactgggggaggggctggggaactgggtagcagacacaggctgaggatcggcacgggagcatggcagccaacgtctcgggtaaggagaaggcatgttggctgtctctgggggtctgcagattgtcaggaggtgggggtagtgggtattggtaaaacacctaggtctggggctgggcacggtggctcacgcctgtaatcccagcactttgggaggtcgaggggggtggaacacgaggtcaggggttcgagaccaccctgaccaacaaggagaaaccccgtctctactaaaaataaaaaaattagctgggcctggtggcacatgcctgtaatcccagctactcgggaggctgagacaagagaatcacttaaacccgggaggcggaggttgccatgagccgagattgcaccattgcactccagcttgggcaatgagcgaaactccatctcaaaaaaaaaaagcctaggtcaaggctgggtgtggtgatgcgagcctgtgattccagctactcgggaggctgaggcagggggatcacttgaccccaggaggtcgagactgcactgagctgtgattgcaccactgcacctcagcctcggtgacagtgaaatcctgtctccaaaaaaaagccacgtctagacgacacttcctccttaagcaggctggcgttgggagcagggaggcgcctccggagaagcctgtccccagcctgcagaggcaggggtggggtgcacaaggagtgagtgcccctgtgctgctgtgccctgggcactgtggtgagcactggcaccagtaatgggtaagcaggcccccccatcctcccgaaggagggagatttttctcaccgtcatcaggtggcgcagggtatgggggaaaataacgcagggaagggagagtggaggcacgagggctgctgtcaacagtggttagggtggccttggggcctctcgcaggcaggaccacggacgtgggaagaggagcctcaagaatgtctgggtgtggctgggcacggtggctcacacttgtaatctcagcactttgggaggctgaggcgggcagatctgaggtcaggaattcgagacctcttggccaacatggggaaaccccatctctactaaaaatgcaaaatttaaaattaaaccaggcgtggtggtgggtgcctgtagtcccaaatactcaggaagctgaggcaggagaatcacttgaacccgggaggcagaggttgcagtgagctgaagtcacatcattgcactccagcctgggtgatgagagtgagactctgtctcaaaaaaaaaagtctgggtgcgaaggtaccaaggcacaagtctgcaagagcagccaggaagcctgggtgggctggtgcgagggagtgagtcgcggagcacagagggtggcactggggggtatggcgggcgggagcgctcttgggggaccttgtggggtgagtctggctttttggcggcaactccctggccaagtgtgagcacctggaagcaaaaggatggggcaggactccagcgctcgcgggtgctctctggtggccacggggagaagaggctttgggcggcggcgggtgccaaggtcagggcagagtgggggctggacccccacggggctttggacggcacagatctgaagtggagccggcaggccttgctggggctggactttggggaggaggcctctagtggggccaggtgtggtgggggagtagggtggccgctgtctgtgttaccagtggaccttgagctccaagactgcctggcccgcctaagctggtccattggggcccaatgcataaccctggctctgagcctcaatcctgtccacataaaggagtggagcccggtccccctccagggaggggaaagaactcgtgtccagggatccacgccatggcagacgtgggctcttggggtagcaggagccgccttatgggggaatagggctcagctggtgacaccttctgcccacaggtgccaagtcctgccctgccaacttcttggcagctgccgacgacaaactcagtgggttccagggggacttcctgtggcccatactggtggttgagttcctggtggccgtggccagcaatggcctggccctgtaccgcttcagcatccggaagcagcgcccatggcaccccgccgtggtcttctctgtccagctggcagtcagcgacctgctctgcgccctgacgctgcccccgctggccgcctacctctatccccccaagcactggcgctatggggaggccgcgtgccgcctggagcgcttcctcttcacctgcaacctgctgggcagcgtcatcttcatcacctgcatcagcctcaaccgctacctgggcatcgtgcaccccttcttcgcccgaagccacctgcgacccaagcacgcctgggccgtgagcgctgccggctgggtcctggccgccctgctggccatgcccacactcagcttctcccacctgaagaggccgcagcagggggcgggcaactgcagcgtggccaggcccgaggcctgcatcaagtgtctggggacagcagaccacgggctggcggcctacagagcgtatagcctggtgctggcggggttgggctgcggcctgccgctgctgctcacgctggcagcctacggcgccctcgggcgggccgtgctacgcagcccaggcatgactgtggccgagaagctgcgtgtggcagcgttggtggccagtggtgtggccctctacgccagctcctatgtgccctaccacatcatgcgggtgctcaacgtggatgctcggcggcgctggagcacccgctgcccgagctttgcagacatagcccaggccacagcagccctggagctggggccctacgtgggctaccaggtgatgcggggcctcatgcccctggccttctgtgtccaccctctactctacatggccgcagtgcccagcctgggctgctgctgccgacactgccccggctacagggacagctggaacccagaggacgccaagagcactggccaagccctgcccctcaatgccacagccgcccctaaaccgtcagagccccagtcccgtgagctgagccaatgatgtggcctagcggaagctgcctcctcaccctaggtgttgctggagaaccctgagggcagggcccgagccccgacacatcccttcccccaaaaagcaacacctgtgcttgcagccaggtcaggcccagctgcagcccaggcaggagcagtcgcctttcccacccacagcgctggccacagggctccctgcagggtcagggaccagaccacgcccagaggaggggaggcactggcccccgccacaggactggagacgcaagaacaaaaagaaccaagtagagagagtggagctgctttattgcccttggagcccgcgctctcggaggctgtcttctgtcgccaagggtcccggaccgagtacacagtggcagctggcttagttggtggacggcctggggtaggggagggtggcaggtataagacttctgggggcaccccaagaccccagacacccaagtggcatcttgggggtgggtgggcagaggacggggtaatgtgaggacgaagcgggcacggagccagatggccagtctccaggcctggtccacggactggcagggaccccaggcacaagagctgccacccctctgcccggttttggaaaaaaacaataaaggactgtcccctcaaaaccagccgggggactgttaaattggctcagggctattggttggcccaacactccgtgaaggtgctgggacaaggcagggagcaggggctggggcagggatggagtcttacttggcccactcgacgttgaggatgaggtggtcgtagccaaagccggacaccccggcaatggcacgcgcagcatcctcgcggcggtggaagctgatgaaggcaaagccctgtggaggggcgggatggggtcgggcacgagctaggacaggcgaccctaggacaagtgaccctcacacagccccaccgtgcctgcctgcctgcccaccttggattggccagtggtcttgtccttagccaggtagatgcgggagatggagccgaaaggccggaagagctcctgcaggtcggtctcacgcgtgtcctctgacaagttggtgacacggatggtggcgttgtcgtcggctgtgtgggagaggggaggtggctgtgagggggaggacactgcccagccctcgtgtgctgcccagccctcgtgtgcacgcttcggggataattacgaggtgccgggaggtgcccacccaccagcctggcgtcggggtgcccctcacctctgcggttgggctgcatggactccccgcggcggctggccccgtcgcgcaggctcggcggcacatacttccctgtcttgttctgcgtggcctgcaccggctctagctctggggaccaaaagacagtcaagttcaacctcactgtggcgcaggcgtggggacagagccgccccaggaagctcgggcttcagtgttgagccagcgcaggcactgtgtgccaaaccacaggcagccagttggccacgaggacaccaaggtgacacctgagaagctgacaccatttgagctcccagccagcgacactggtggaggaggaggaggaggagccccgaccccaccccagagagggcgggaggacaacaggggcagcagcctcacatgcacagcaacggcagacatgggacacacaacaggaacagcgcccaggtccccctcgcgtggcaggcgacaagtgcacgtctgcactctcacactcgccaccagcaaatcccaccaaagaattcggacggtacagccacaggcatgcaacggagacactatacacacagtgcgcacacacgatgtggggtggtcagcaccctggggccgacagacagcagctcatcaggacagtcacagggcc

SEQ ID NO: 432 - DNA, 8060 bp, Homo sapiens
gaacgtgacctggagggcaggaggggaaagcactgccagccttccactccagtgttaggaccctgagtaaaagccctaaacccaggaaaatccaaaagagaggacctctggccacctatccctgctaaaatgagcaacagtactctatatacacagatacacagttcttatgccaataggcctcatacaccctaaacagatgggtacaaacataccaaagtgtaaggtgagcaaacaacttttcaattttgcaatatgtttttctttttcaataatattgggtccttggaaatgatggggggcagggtggaaaaacctaggagagcaggactctaataacatgtggccacgtgacagctggtaggggttggtgtcttctctgtggtgctcaggggagagtaacacaccctgacacgatgggactcccctgctgcctggtttcttctcaagccacagctctcattctacccttcacagaaaaccctcttgggatcttgccaactgcaccaaaccctgagctggatcccactgtatgggctcacccagcacaactgaagagctggagagttcctattcctcattagaggtctgaacttaggaaactgggtctccaaagaatgagggtccccagttttgtttagttgtttaacaggtggaaggatttgggaagtcagacatttggtatgaggtggaagaaacaagccattggctaatttttactttccaccatatcttggtgttcttgacttatatttgggctacatatcgctaaaaagggagataaaatttttacttaattcttacttaaaagataccaggactaagaggcaataattgtacagagtttggtgactcaacataactgatggcaacatgaactcaatctggaaggaccccaaataaacttccagatcacatataatttagaacaaccatgtactcatgggatgctattttctcaagcctacaaagtcttctcaacaggcaaaattctacagctaacaaattgcgctttcgtctgggtgggaagcctttatttagagagctataagccatccctccctccctttctttcttaacaatgcttgaaatattgttattgcttaacaaatgtcaaataataacgctgtaataaaaacaagcactagtgggttaacaatgcagttttctagcagcagttatataaagtattctgggtagaactacctcctagcatgcacatagtgggaacagaataaaatcacagcccatagaagtagcccttggttataataattgcaaatttgaagattattctctttgtcctttcaaaagatccacaggtattggaatgaaactgttaaatccgaatctccaaaggatatatcaatgtgtgaatgagaccaagtaatcttaacacagaccaaactttttatttgaatatctcaattaggtttcagggtcaagaaaagcatcgttattattactattattaaataaaggcatggcatttactctctcctgacttcgtaaaacaactgtttaattacataacagaaatatgttcatcatgagccatatacaatgcatcaatcatagatttttccttaaataactattttcttaaatatctatataatgtattctacttatggtgataccctcgaggctttgtgagttatttccaatccctcatgatgctactttggaatgttcatcaaaattggtcttaggattaaaaacatgagggttggttggttcatttattcctttatctactcagtcactcccaaaacagaaggaagacaggaggaactgggataagttgaggaaagcagaaagatattaggaagcaaaataatctattggaactagaggagaaagggaaggaatacactcttcccggtggtgggttgctgtgcccagccagtccctctgttttttctccacctgcacgaatctggcaggtggagaaaaaacagagggattggctgggcacagcaacccacccactgggaatgacgagggagagaaatggggagttcaaggctgggaactaaagcaaactatgacatcttgtcttcgaaggtaactttaatttcaggttcttgaaggggtggtactgcctttatcacccatttttcctgcagaaaacctcatgtttagaaggtagataactggaaatagccaacacgggagtccccaatgtagccaagggacagggcaccaggcctggcaatctacaaggtttttccaacaaaggatactaacaatcaacctaagacttaatgagaaaactgaagggaacatcaaacataccctcccagaaataatccttccctatttggagaaatacatacttcatggaccttcttatatcactttcctcaatctattataatagcttacaatcacagactcttgctgttgggtagtatgcaagctgcgttctgtgcagaaatataagtgggcacacattcatgcggagcttctatttttaggtgattataatttttcacaaagaattgccctttgggatgaattttatatgctcattctcagctgaggggtgactcgggtggtgcgaagtttggtgaaatttcatttgagtagtccatgcataaaaatacattccagtacccctacctcttccctgccgtgatcaaatttaagagagtgcttttaataccaagagaagtcaagaacagtttaattttaaaaatttcaaaactgtcacatatctcaatgaggactgtgacacattctaaaaaactaggttaagaccaaaatttaagtttgtggtgagagagcgtgttacattactttacgtgatacacttttttctactacattttaaaagcaagatccaaataccagatacacactggaaggactgtgtctggctcccttaactgaaagaattgcaaatgtatttattttagggacaagtgaagaaaaaaaattatccatattgatttgccctttaagtgtcagagtgctaaaaatgaagagtggcgggagcagcagtgggaggaggggtagagtcaagccttttgtctgttttccatccctatcggttacttgaagaggagaatgcttaggcactgctactggaagagggaaatcccaaaatggggccaataggccatgctgccaaacttccttggatgcagtgctgcgaggcagaaagaatgtcatgtggacatcagagctgtgccactgtgtacagactaggaagggggagtaaaggatgtgcaggaacaaaggggaggggagagaatactaaatactcccccaagaaacttatttactgggggagaaacatacacactcataaaggtcacaagtaacacaaggcaaccgaagtgtcaaggaaacagtacaggcagtatacactacagctgttctgagggcataaccattctattgtgcgtggacagtgtgggggaaggggtagtctgggggggttccaaggaagagaggagatgggactttaaaaatcccacagagtgaagggcaggactgtaagactcagagggcgtttgagaggatctaggtgagctgaggtccaggctcaatcgagtctggcatattcaagggactcaggttgtagtagagggttggaagggttgggtagtgctaagaagggaggggccgggatatggacagtctgccaagaagagacagcacacctagagtctatcctgcaggtgttgacaagccactggcctttctaaatgagagggtgaagttataaaggtaccatcttgagaaggcggatccagtgtaaaaataaatcagatggatagaagtggaactccatggcagagaggtcagtggagcagcacccagctataaagatgaaacaagctgatgaagagaatgatccggcaagaatggaggcatggaaagcaaggatggaatgatgtggtaactgagaggacatggaagtaaagaagaggaaggactgagagaatcacaggatggcttaggccttggggatttaaagaataaacatgctcgagtaatgacaggaagctcaagtggaaatgacacctcctcaccacgatctaaagcgtggagttggagctcagcatgatggcagggctacagctgcagtgtcaaaatgccctgcaagatgtggtggggagcatagaggcaaagggcagaaaggacagcagaagcttggggaacagtccatacctgggggtgacagggaaggaagatggagcagtaggggaactgaccgtggagagaactggtgtaacacagcatcacaaggctggggagaccagagtttcacgacagagaagacagtcaaaaagaaggaagactgataaatggccaaggaatgtgctccatagcaagctggagaaagaatctgagcagagagcgtgaggcagaagccaggtagaaattggtaaagaagaaagtgggcagtgaagaagaaatggaggtggcaggatgaggtcaattccatatcctttagagtgcctgtgagatactaggcactgtgggacaagaccaagagactgagtcaggcagacctatctagcccattaagaactgctttaaagggacacatctggcaacagtaaaataccaaagggaaggattacatctggctggagatgactaggaaaagttttagatgagataatggaatttcactagggtcttcaagaatggaaagggcttaggcagttagacatgggatacaaaggcattctagacagacaagtaaatgaaggaaaggcagcaaaagaagagagaagaaaaggctagagctggaggcagtgacatctctaacagactttttttttttttaagattcacatggaaatttacatacagattaaagagccaaaacactttcatcaaggacacattctgcaagcagaccatgacattcccatcaagtagaggaaccagtaaaaatgtgcttaaaagttaggatgtcagggaaggtagtgtgaaaagagtgagttttcaattctttgaaagaaagacaaagaagggcaggcagaaaggagggcatggtccttgcagacctggtgtggttaaggaataacacttcgatttcctaagaagggtgtccacagtgaaggatattacaaaatgaggctggtgagatggggaggagtggaaggaaatggtttgctgggtgggaaacctcaccagctgggtcagtgctctgatagcaagagggattctggtgagtaagcccacgcatgagaaaaaagcagtacatgagaagaaggttctcctaaaggagctggacacagaacagcagagacggagtatgaacttgggggaggccccgctgcctggccctgcagtggtacctgagcaggtgtaggggaccccatgatgggagatgctcaacgctggcaagggatactccaggtcctctctgccccccaggctgtactttccactacagcatctaattttacatataaggtaagtatatctaaggcaggaatatatttactcatttactgatgggcttcacctcacacttatactgagtgtccagtacttccagcccaagtcctttcttgctctccaaaacagacgtgcagtaaaatgaatggttaatgagtaatggaaaatggaataagagtttatggatgctagacagcaatgattacttattctgcatgagctcatgatttcacaagtttaatttaaaatcatataccatgtatatgctaacatacacataaatatatatatatatatatatatatatatatatatatatacttgacataaatacctacacttgatcttagccaaaaggctgagaaatgattataaaatatatctgaaaaaatacacaattgcaaatagcagttgcttccaagcaggggagttggataggtggccaaagagttatgaaggagattgacttttgcatataatatttacattttctatcatgtgcatatattgcttatcaagaaataatgttcaaaaatatacggcattttatttatatatattgtatcctccgagaaattgctgtaatgaagtttgcttttccctctagatgcctgggcaccacaattcctaatggtgatgccatttccacacgttttgtggcactaaatagaaaactgattgaaaacttaaagacgacagatatgaaatcccacatgcaaactctacacaaagaccaaaatgtaagctgggaaacaattcataatgctccctacattatcagccttcagcacaagtttggcacaaacccttctgatttagtatctcagtaaccttgtgagaaaagacacagagaaaccaacacattattgaagtcatggggcaagccattgggtgtgaggtgtaacacgagcatttggaaagcctggaagctttctctattcatgaaattgtaagttggccccttctctgtctttttaattgctctctccccacctgctttccacttttatttataagtaattcccaaagctcagatctatgtccctactcctcttctacagttccttgtgaaagtattttctttctttagaggtactcctacgactctgtttgtgactgaaatggatttcgagtctcttcaccagtcagtagctgtgtgatcttaggtttctttagtcttcagttcttctataaaatatacaatcagtaatcttagccatctgaagccagggactacatctgacgatccttttagattccttctaagactctaagtatcaactggttatggtcaatttattatttgttttcttatccaaacaagattttcctcctacttttcatcaacagcaatattgttagctcatcatcatacatcaatttttggttcttttgttgttatttattttcctttttttttttattatactttaagttttagggtacatgtgcacattgtgcaggttagttacatatgtatacatgtgccatgctggtacgctgcacccactaactcgtcatctagcattaggtatatctcccaatgctatccctcccccctccccccacgaaactggaaatcatcattctcagtaaactatcgcaagaacaaaaaacctttttttaaattattatttttcttgagacaggatctcgctctatcacccaggctggagtgcagtgctgtgatcacagttcactgtagctttgacctcctgggctcaggtgatcctcccacctcagcctcctgagtagctgggactacaggcgtgtaccaccacacttggctaatttttgtgattttttttttttttttgctgagatggggtttcaccatgttgcccaggctggtctcaaacttctgggctcaagtgatctgcccttcttggcctcccaaagtactaggatatggcataagccacagcaccggctaattctttattttcaagaagtcactgagattgttagttcctgttttaaaatacctttcacttttaacattcctcagtttcccatatccttaccataggctaagttatcacttcaagcatacactactattacttaactttcaaatagtctatctgcctcagctgcctcctttttgtgttcatctacacgaattctagtgaatgaatagcctgcaaaatgccaatctttcccaggagtcaacagcattcttccttctccctctcctccacctaccaaagctaattttacttccaaaatatttatcatatcccctgcctcctcacaaggtattacttgtgatgttgcaagaaagagtacccactgaaatttctgttaaaccactattacctattctggcctcaaagtgaaggacagatggtgacatttgcaaggttgttttcaaacacaatctaatatgaaccagtataacagccgaagagcgcaactgcacatattcctaatgtccattcccaagctatgttatacaattataaaatcattctctgaattgattttattttcttctcttggataagggcactatctacagcagcgataagtttccataggaactaaattcatttcaaaaggtttgaacatagaggctttaaaaaaagtgctcaaacaacatacgaattttgtacatagtgccttgcagtctt

SEQ ID NO: 433 - DNA, 8060 bp, Homo sapiens
tcagtgcattggacgcgctgctctctcccctgaaggctgggctcgcgtgggcggccgcgggtggtggccctcccggttcctgcccgaggaccagttgtaaatgttactgcttcctactaataaatgctgacctgatcaaatggagcccagacgctggccctaaacattgtgtgcctgctttctctgcctctctgcaaaatatcacactcaggatatttctcctctacccctgggagtgagacattgttaaaaattcagggcccttccacctgacagatctctctgatgtgtctctgccttctctgcctcacatccctttgtgtaggcagatgcagcagcacagaccctgtggggggacattggtgcctccccaagcctggttcaaggtcctccacgaactctgtgcttgggcccagtgttagccttgcagaagcgcccagaagagccagcaggccccagaagccaggcactttcaggctggggcttgggtacacagcaccctaaccttccctgggctcctgaagccccagatgccaaacccctctccaaacaagggaaaggccaactctacactctggagcaactgtcccagctcggtggggctagctggctccgggaggtcccagctggtcaggctgtgagcttctgctcctccccaccaaagccccaaagtgaccttagcgatcaaaatggtcaaggctctcctccccagccacctccatttcaccgcccccttccccccacccagcttctgtgtatgtttagcccccagcttggccctctgagggctgcattcaggggctaaaatgaaggtcattgtaagtgagggtttgggtgagcacagcatttgcaggccaaagaggcagcactgccaagtggcctgagctgggtggaaggtgggggcggtggcagagatcttgggggatcccaatgaaagaggggacgcgaagaaaaagcataggggggctgggagggaaagccaaggaaggcccagatccggcagaaggtgctgcgcacccctgccactgtggccagctgggtacctagggctctttgaaaacaggaagagccgaggtgtcataaagccatctagcgggccagacgtctggaggtaatgagtttacgacaggcccagtgctttgctttgaaaccatctcattttgatgtttgtgtttgtgggagaaaaggaaaaatgcagacaaaactgggtcttaaaatctagacaataaaatataaacaagactgcgttggaccaagaaggcaggggcatgggagcccccaggtgaggtgtgagcacctaggaagtaaacatgaaagaggtaggaaggaagaggtgaatgaatttctgatttttgaaatgaaccaggtaatggaagtagcctaaggagatggcattttacaatattttgactatgaccacggtttagctggttctttagaaacaaacaaacaaaaaaattggcctgttatctggggatagggtggttagtgatcttaggtcatttacccaggtgagagtctcccagaagtgtggttcgcgggaaaagatgaagttagatgcctattcacaagaatctctggccctccactccaaactttgaagcaaaatgttgttgaaatttatgtctattcacttataaaaaaatacaattgttacacctaaactggaggaaagcagttttgaagatgagtaaaaagattaacctaacaggaaacacttaagccaattgaatagtcattgcttttaaaaaaaattctagtggaatgcttagttcaatgacttttgatatatatttttaaaatcccatttattgtccatagaaattccaacaaacagaagcgcaaagggactttccagacagccactcagagatccagcaaaaagcttttgatttggcttcgattccccccaaaatcggccacctaagtgggccccaaagcattaaagttacagtgttaaagtagcaaatattcatgatttaatcctaaaagtaacagctgtaagagaaaaacaaaaacataacaatacttgatttctgtaatttcttggttgccaaagtgtctggttcctctggaaaataaaaagcctcttggcagttgatatttagaaagttgtaggttttgttaaatctagcctgtcctataattgttttaaaaggcacagctgggcggttacagcatggggacttttggtgtctggcaaaagaagggctggaagcttttggaaaagacactactggaagctgttgggagcactgattagaatatcctaggcatacaggagctcctgcttgctgctcttgacttgttgacagtcacaggaatgaagcattattagtgtcagcagtccaagccccaaattgaagaacgagattagaattggtttgagatgaataaaaattaaattcagtggactggaggtggcatttggccactagagagcgctgttgctccactttctgatctcgtaaagctggaattgcggcggagaaaggttttgattaaaaatattaacaatcttatttttaatccgaaattaggataattttaaccaaaaataaacaaggtgtactattaatttctgtgtttgctgggcataaaattttggctcgatcatggcttcagaaactttggactgtggcacagctgaaactataaaacatgataaattaatgtattatatcaaaacagaaagctgtaaaaagcatagatcttttcttactaagttaatcgcgctctttttctactcatattataaacggaatgcttaaataaatgttaaaaactgttttgtcccaagaggaaatgttgtaacgttttctaaatttggcctgaatgtctataaatgaattttctagtgttcatttttcttttattcccccgaggaatcacacagttctacaagatgcctggtattgttgagatccaggctctttcattttccccccccccattccattccaaaatccactcatttatccagggttcaaacacacacacacacacacacacacacacacacacacgccaaactgaaaaaaaggggcacaattacaaaggtagctccaaggctttattgacaataataatcttttaattgggcatttgcaagattgaaggacaaatccttaattgtcagaatcaattcgttcgccttcggatttaaagaaagtcattatacttggcaataaccagcagaaaaaaaaccccacaaaaacaaacagcaacaacaacaaaaaaacccttgctctccaccaccccaagtctgcactccttactaatttaaaaattaaataaagcatgcctctgtcatctccagattcattaacgattcctttacctttcagtcattcccagtagaaataattgagtcggacattatcaccttgctatgtctgtccatctcgatctcattttctccatttgtaaaaatgatatttcagtccacccggacacaagtcaggatcgcgctcgcaggctgggccaacccacaaggagctaggggtagctgaaatcgctcgccagcctgcagcatctctgaggccgtctggggttttcggaaatttgcatttggtgtggaaagccggcgtggtgcgtttagcttgagcaggggcgccttggaggtctatttccaaggctgtgggcctggcgccctcacgacattgtacctatcccgaaggaaacggggctcagtcacccaaagagcccacgagaaaggccgagcaggagaggggaaaacacacacacacaacagagaaccattgcatttattggacattgaaacgggagcagagagggaaaggaagtgtgtggggaggcggttggtagggtaaagccagacagctttggagagagctgctaaaatcgggaatattttgtcgattcacactcgactgggccacatgactcgggcaacttttcttcatctctgctcacaaactaggctgagccttctctttctctgctttgggaaaaattcgtaactttgaggcctgcgcgctctctcggcagtaatttcacaggcttggcggaggaagtaggatcgttagcataagatgggccgcctgcagctgcctggaaccggcgcgatctgaacgccggctgggaggctcctggggggaacttgcggtcgtctgccctccgcactcctccgggaaccgcagccggccctggttcgctgcgcgccggggctgagacccgggagccgcgtcctgcccgaggaaatgtcaccctccccagcgcgagccctttttcccgcctcagaacgtttctgtccgctcttctatttactctctcagcaagcctaatgccccctcctgcattcttcagcctccccctgcgcccagggctgacgtctatcaagggtgaaatgatggaaactatattcatgggcatgatttccattaaatatcaattaacctgagagcctcggccaggcttgcggtgcgtcaagggtaaatgtacatctcatttccacagggcccgctcggctggaaaagaaaggctttgatttgctttgataacgccaggatctggggccacactcgcggcttttaattaaaccacttcgatatgccccaactcaaatgcacggtccggtccgtcaacacctcttgtccacgttccctgggctgcacccgcgtgtccagagctgcaaaagccacgggcaacctctgcttttgcagccaggggctcggggaggcagtcatttgctccgcagcctcctgggagtggcctccttggctcccccaagtctaaggctccgccgcggcccctccctgccggctgcgatccgcattcccgcggccccggggcacacggagcccttggcagtgcgtctttatgggccccctttaaggccggcggaggcatctcgggccgggcgcggcgctccgtccgtcggccgtagcgactgaactgcgcgcggatccctccgcggggctcctcgtccccgtcacgctgactttccgtgcagtgctgtggtgcgaaaatgcctcgccggtgcgcaccgggtcggcagcctcggcggcgggggcgagattggcgggaggggggcgcggggggggcgcggtaagaggtggcggcgggcagagggtgttttttttcttttccctccagagccggggtttgtaaaccgaggccagagtgtccccgtgggccgagcgcacttttttcttgtccgggtgcgctcagtcactggtgcctgagaggaaacagtggaggcagcggggcaggtcgcctggggcgtcggcgattatattgcggccgagccggggcgcgccgggaaaggccgggagggcggcggcgcgcgggggctgggcgaggccccgcgacccgcgagggaggcggcgcgaagccgaggcggcgggcgcaagagccgggcatgagcgcccagtagctgagcgcccgcggctgcctggcctcagaagcgacgcgcgagcgcgggcgggcggcagcagcgacgtagcccggcggtcccggcggcgagagcagccgccccacaggcccccgcggcagtgcggccgagtcgaggctcgctctctggctgcttagcgccgcccgcccgcccggggccgccgccgctgacgccccaatgagttcgtacttcgtgaacccgctgtactccaagtacaaggcggcggctgcggcggcggcggcggcgggcgaggccatcaatcccacttactacgactgtcacttcgcgcccgaggtcggcggccgtcacgccgccgccgcagcagccctgcagctctatggcaacagcgccgccggcttcccgcacgcgcccccgcaggcgcacgcgcacccgcacccgtccccgccgccctccgggactgggtgcggcggtagggaaggccggggccaggagtacttccaccccggcgggggcagcccggccgctgcctaccaggccgccccccctcctcctccgcatcctccgcctccgccgccacctcccccctgcggcgggattgcctgtcacggggagcccgcgaagttttacggatacgataacttacagagacagccgatttttacgacccagcaagaggccgagctggtacaatatcctgactgtaaatcgtccagtggtaatattggcgaggacccagaccacttaaatcagagctcgtctccttctcaaatgtttccgtggatgagaccacaaggttgggatgcattttttttttaagaagggagagggggagaaatctgctttcatctcacgttctggctttaaaactcccgttccctctccccctccttttccttcttgtgtagccacagtggctcttattcataaagtaatacagactttttttaaaaaagtaggaaccatgtaaagatgatggggacagaataattgtgaagacctctctgctcctcttgcctgcacaccctatatatatatatcggagctaaagagctctgtgtatatttcaccccgtagacccccgttccacaaacctccagcaacatgcagaggtaccataacatttttaaaacttttattccccccccctttttttttgttttaatcagcagctcctggtagacgaagaggaagacaaacctacagtcgcttccaaactctagagttggaaaaggaatttctttttaacccctatctgaccaggaaaagaagaatcgaggtttcccacgccctagccctcaccgagagacaggtaaaaatctggttccagaacaggagaatgaaatggaaaaaggaaaacaacaaggacaaatttcccgtttcccggcaggaggtgaaggacggggaaacgaaaaaggaagcccaagagctggaggaagacagagccgaaggcctgacaaattaacttctacctttaaaatttaccacagactattaaaactaataatcaccatatgctgtggacaccacctattttctttgttggaaaggaccttacctgtgtttcaagctaccttcatgtcactgctcttgaggttttctgtgctttgagagggatttgggtgtttaaaaaagtttctagtatcacatagaagctgtccttgagctgtcctatggaagggtaatttgatactgaccttgtagctatatttttataatggtttttaatgtctgagctagtgatttgcctcaacaacgtaaacttcctaatgattagcacttaataattgcatataaaatgctttattaattaaacaagtgcacttgaacattttaatatttgtggtgagtaaattaaaaggagtttattaattaaaaaaaattatgtctgcagaatactttatattatttgattacaatgtattatttatggattttttattctttcctttataatgaatagttcgggtgcgttttgtttactcctaaaaggtttctttgcgtattttctaaatgtaatatctcggggaaaatattagaaaagcacgtattagctgaagaatgtaacttgtagtccagctctgcagcttccttaaacttaagaaaaagattgggccagtgacaagaatttaaagacaatgtccaagttgacaattatttttctatagtccatacaaattaaataatctggcaactctggcaaatcgccttgtaaaatgcgtctcattttttaacttgctttcgttttgaaccgcccttgtaatcgcctgaaatcgctagttctttatgcggtggctgccgctgtgttccgttattttcagtaggtgtcatatttatttgtattgcctttgttctgttcgccgctggttttaaaccagcttgctgtgtgcatctcagacgtcggttggtacgtcctccgctgttcttcaggaaagcgatagcctcacctatttgaaacaagccctgagaggaaacgcagaaaaacctgagtgtaaacaactccggaatgtcgctagctccttagtaaataaatgaatctctttctggagctagtgtctttgagcgccgcaaataccccttttccatgaatcactaacaatcgcctgggctcgcacgaaggaaaggactcgctcaaggcttctgtttaataagaaaggggtggggttacacacattccgcgctgttt

SEQ ID NO: 434 - DNA, 8060 bp, Homo sapiens
catctctggagcctctgcagcccagggaggtgcgtctaacctcatgaccctctgaacccctagaagtggtcaactcgctgaagaacattgacctacccttcactggggaaattgggcctttggtggctcctctacatccagacctctctagagaggtgaaggaggatgtggtaggagaaacattatgttcactaagaacctcctgtgtggatgagcacttaattcaacattgtgattttttatgacaatttccaagtgatgccatcttcattttacaaatgagaaagctcaagtgttaaaaatttaaattgctcaaaattccattacatattttactaacttcaaacctgtgctcttactataataacacgttgcctacctcttaaaccctgaactcccatgaaggaaggaaggcaagcagggaaggaggaagggagaggaggaggataggaaggaaaggaagaaaaccttgccacagttacaagaaccagtctcctgtagcagaaatggcatatagaagttatttaagtttttaaaattcatggctcaagattcttgggccaactttttttttgtaaaagcatagctttacgagttacaccggaggtggaagtgttgctggggagaaccttagacaccaaagttgtgggcggtcggcgcaggcttgtgtggggctcattcaccctggctaacaacttgagctgagggttcccttatcaaaatgtcatccaagcctgtgaataggaggctcacacagccccacttctgcctctcacctatccccagaaaccgagaaaaccatctggtttttgcacttagataaagtttaactttcctgccacactggccgagttgggctttcagacatccctggggaagtgggaaaacggggatgtggaaggggaggagaagcctgaagggcctcggttccatcctctttcttgatcagcgaactccaggctatatctgcccggtttgcctaggacttgtagggaaacgcggtaaagggaggcgggtagagagttggattctctctctctctctctggccaccttggatttcggcttttacagaattatgcaggcagagttctgtagaaagaggttagaatcaggtttccattggtcctgatttgtttatcattctaaacagtaaaatgcatataaaaccggcacctccaaaccacaggcgtgcttaaggcgctattgtcggcttggaaatgtcacaatgaataaatggtgtgatggactttagcgtttcgcgccatagcttttagccgggaagctttccaggctgccctgcttaatttcggcgtggttcctaattttctctctcccatcctctctcttagactggaaacgcttcccctatttcttccgtagcggaccgggagagcttactggcgctctgcgaaccggctggaaagaaacaccgagtcactcgtacagactcttggtcgcagaacttggctttccgctattggtcctccagaaccgcttgaaacaactggccccagctggcgcatcagaccgcagtgaggaatgccgcggggcgggtggcgaaggcagggtctgcccgccagtggattcccgggtgtcccgcgtggagcaggcttgcccagctgggaagcccatcaaacctcagtcttggcccacagtgggagagagaccagtgggtcccagacggaggccctcgcccgcttttggcgacctccactggcgtgaataaaagcacccctctcttaccctcagaaactgtgggtagcaaggtataaaacggagtctgggaccggtaagtcccaaggtgagcccgtatacagctctgccatctctgaggggttatgcagattctgagcagggtaagtttgtggaaagaacctctagaagcaatctcctaaagtctttttccagactaatatttataatggttacacgtgatgggcaaaaatccaaagacacggtctcctaaccctgaaccaagtgtgacatccacagtttcagagtggttttagctgagatttcaccttcagggatcgaaggagtcgccaaccagaattctgccagaatccgcaccttcttatgatcgcgaaagtctccccatcctccaccgcctcctacagtcctatggcccactgtacccttggcgctggagccctggaggtgggcggtgagggccgcgggccagggaaagctcgggtccgcaagagcagggctctgtttctgcgcctgcaggccgcccgggagtcctggatgcgcctcctttgaccacgttttctctcaggctccagctgtgcctcgccccgatctccacaggtctgacccaggcgagtccctagaaggcgggcgggaggagccgtagcaggggcagtttcgggaatccgagtttccggagattgcctgagcaccgcagaacctccaggttaagttctctcaaacgtgtggttactcaccccgaggagctcagaggcaaagggttcaatagtcaagttggtggggactttccctacttaaagttataatttgctaattcggatctattgcttttaaatatcgagttccagagacctctgtcaatgcaggcttaatttcatcccactgatgaaggatgtttataaacggcgcctgcagtgcgagctgagtgtgaaaatatcagttttatgccttttgataagaattaccgaggcggaaggctcattagacgattacaaatttcgcagctgctcgcagcccaattaggcagctcttcgggtgagtggaagctgtgggggtcagggcgggttgatgttccctctctccagcccggacctccaatcaaggcctggctccacgggatctagaccccttccctgcccccatctgtttttagggagatacactcaaggcttcccttaagcaggagaggcacagcctgggacaggacgcactccgaagtctctcaggctgtctttcccatgggcttgcaaaaagccctgtggtccacggatgttggtagacaccttgggtgggcctgccgcctctgattttcaaattttcaatttagtaggtaggaactgtcacgacgcaggcgattgcttttccacctgtggacacataagatgatgtttttttgatcagagtcttcgttcaaaattggaatcaattggcgtttgggctaaaaaccctcattactaagaccaaacaaacaaacaaaaactcttttgatttttagcgcacccctgtaaagtaggaagataacttttccgttgccccagccgaggatgagcgtgggtaagaggcgtgacgcgagctccagggaaccgggccaccaggaagaagctataccttcgtacgcccacccctgacaaaaggtcagaaggtcgttggaccccagaccgacaggacgatcagccctgggattcatagcaaacacattcccctcttcttgcacactcgacccccagccaaaggcttataccgcccaggacatagaaattgactcaccgcccagaggcttacagctcaaggaggggtgcgcgcagctgcaccccgggacaggtcagcatcccacaaggcgcctggagtaaagcgaggccagaccaatctttcacgtcttctgctcctgtctgacgaccattcttcttccccaagcccagaaacctctaaaaatgaatcattttctccacttatgcagagatagacgctcttagatcaaggttagtattttgaaaacctgactgagagccgcctgattaggcgagggtgggtggaaagaccgcataaatgcccgcacccccgccctgcttccctaacacagctccagctctctctggatctccaaatgacccgcgcgataaattctcctcgatagtagccagacagtaccccagattcactttaaaccctaacacacacacacacacacacacacacacacactgtaattaaatatccaaaccggacctttatgtttaattccactttcaacgaaatcctgctctatacacgacctgatggcgccaatgttctgcacgactctgactttccattcggaagagcggtctccacaacgatgctatttcatggaaaatgcattatgtgaatttctccaccacccccaataccgatttctgcatttgatgaaaaacacaagtctttctggttcccacgcacaagttagctttttgaaaagtcagtccaccccaatctttcaattttctaagagggcacagattaattatatcgtcctcctcccttcgctcagtaaatttaaacgagatctcccagagaggaccggcagggggatggctaatattaacttgtgcgcagctgcgcgaaaagaaaaacaatggcgataggaaaatgctctgaagactctagtgtttatgggagaaaaatgcaatggaggaaaaactaaatttgtagtggtaactcggtcccagactcttacacaggctcacttcatcacaggaaaggctatctatctcctccgctagccggctgctgaccgagctggggtctgggcaagatcatttcgctctttttcttctatacaaataaggcaaggagataagatatgtgtgtgtgcgtgtgtgtgttttacatatatatttccatctaattaaagcaaaatcctatgattctgttaaaggcctttaagaaatagactcctagatcttcttagtttcagaagtttagctttttaaatggaaacaaaaatcatttaaaaataatcttttaaccaaatttgtctttatacactaaataatgaaataaagtttataccacaaagagtctgtttaaacaaacacaccttccaatcttaatcaaaattaaggtaccctgaatacctccctccgccgcttccccgccccgcagtcagaacttgaggcagaagacaaggctgctcgggcttacattttgtctaggagatgaaagagcaatactcattagcaacatacttttgtctttcttgtagccttgatttcaaatctagtcgcaaatcataagcttttgtgttgctcagatgttccttctttatcttaatgagaaaacttttcggaaagggagcgcgaactgctagataagtcagctcccaggctgccaggagcggtggcattcctcggctacaccggacagctgcgagtttcaagagaatgactaaaactttcaagtcacccagacctccacttccccttctgcttgctgcagaaagagatgtaacctgaatctttgtttaggtttgggttggggagcgagaatttaaaagttatggcaaatgcagacagcagattttttaaagtcaagttaacaggacatcccccaatttttttttctttagtactaaacctgaagtcagttggcgtgttctgataaagattttaacatgtagagaaggcgggttttcctgaaagaggcgaagcaatttctccaggaaagactttcccccacacgcccccttcctttatattaggttccaccctctggaaaacaaaacttttttttttttcttttcctggagggactcaggaaaagctcagtgctcacttcactcagagctcagtgaagctgggaaaggaattttaagaacggttcatcagaaagtggtcaggccacagcggcctctttggacgaagacacacttgtagcattatccttctcggcatcagcttttattagtggatcggggcgggggaggggggagatcggcagacacggacagcctctgaccctctggagttggtatgtgataagcagccctagcagtgccatgtattggaagaacgatcagatgtttgtgtgtaaactagtagcaaaggacgtgccggagctggcagttccccctgagaaggtgagcgagccgacgcctggccagaccagctgaatcgcagtgtccttgaaactcgagttgtttgggctcctaaacaaggttcagaaactacctgtaacggcctcatcttcagacctggcaattttttttttttattacgtagtagcgttagtcagtaatcattgcactccctccccaaaagctcacttaacctgagacatggagactgtaatttgggagatgaagcctcgagcctaaggcgctctcaggtccatgtgagtcgtgcttttgttctatttgctgtggtgatcgtggcggtccgggagagtgggtcgggaggactgggcggctgtcgggtggaaccggagacctggctcgtttcgttcggctgcccgcggacacttgcctgccctgaggcacacctccctctgcggggctccagaaaggcctccgggatccctgggcttgccgggagagccattttacctaaaatgccaaaagaaaaccgcagggcacaaaacgagtcacgcggtttgtctgagtagactggggaagctgacaagctctcacctcactcgggaggcaggacctgtgggtatttggtgttttaagtttgaaatcatctgcagcctgtctgagggcctcagcaggacgcgcgcggggcgcccctgactatttctttgctccgaagccggttggggacaccaggcgaaagcggagctgttctgtttaaacgccctttgtgtgtgaggacgcggcctcagtgcagctacgctgggtcccgcgtagggagcgcaccccagaaagggagggtctcggccgacggtccgggaggcccccaggttggtatcttgcctggtgcttccagagggagggagaaggggaggcgaacagtcagaaatgcagaagtgcgagccgctcgagttcggggtacccacccgcccccgagctagagtttttggaaacgaaagcggtctaagcccagggacgctgcgttttcgtttaagaacaaaactccagcaaatacttggaaacacttgagtaacgcgcgttgtttctttaaaacattttgtcagaggttgggtgagttcttttaatggcacaaattaaattcagctggatattttccattattctacccgctttttgcgctggttaaaaataatcctttagtagctcaaatgttgacttactgagcaataagtggcaatttacaccttaaagaaacgagtgtaaatcactcgccactctaattgctgtaagtttacgaaagagctgctggctcggtttaatctgaagcattttcattcaaattgtcatcggaacaaacaccaggcttcttaaatcccgctgtaattagctttcaagtatcctattaaacctcttcacctttcgggctatcctattcaaaaagccccctttttaaaatatatatgtgtcttgctcttttaattgaggttattaaagaaatctagtttcttctcccaccccctcctcaatcctcttttcttctctcgcactccacctcccactgccccgcaccccctttagcccggtgttccccgctccgctatgattgacgtctggaaagaaagagctttgtgaggggatgattgttattaacttgttatccccggcgggggggcggggaaccgacgtgcccgggtgagcgccggagacccggagcccggggagcgcgggacgagctaccagcgctcgggtggcggccgccagcggccagcgaaggaggctgcgcgccagcccgcccgcggcgcccgggctcaggcgccgtgacggctgcacgcgctgccccgcactctgagggccttcattagctcgctccccgcgccgaggctggggcgggcagcacgctcggaacttctgatctgtttctccatactttctccccctcctactccgcagtgtcaggggctcatgtcagaggagtgcgggcggactacagccctggcggccgggaggactcgcaaaggcgccggggaagagggactggtgagtgcggaggggctcgcgtgctggcaagactggccgtggggaggcggcgcaggacgaagggccgctgtccccgcgctccttccagggcccagctggcccctcctgcagcagacagaggacggggcggagagggtctgggtggggtgggaagcttagctggcccgcgaggagggcagggccgcaagacttctggggtccgaataggtcaggggtcggcagccccagcgggtgcgtagccagag

SEQ ID NO: 435 - DNA, 8060 bp, Homo sapiens
cattccttcctggcatgtggagcatggaaccagaaggaagaacaggagaactaagtgctgaggaacaaccttttcagcttttggggtgcaaggccagcagcgtgtccaccatgctcttgccggctattttgagtgactgacgccggcctggcctctgactgaggctggaatgcacaccacgggttccctgttggagggggccccaggcaatagtcaccagagtgctgtggccagttaattcaattatgccacccgctggaaaatgagtgaccaatcactctctggaaaagaagtaaaacagagaaagaggaatcaactttgctaaaaagcccagtctttgggtcaagtcagacgacacttattaattgctcaagactattaattggatgggggggtgtctgacagaaatgaacgctacacacacacacatcacatcacacacacacacacacacacaggcaccaaacacaccacacacctgcctcaatgagtttctttagaaaaggggcgcgctgagcaaccccagagcagatggaagggagcgctgaccaatatgtgcatatggcatggatgatttcctcaactttgtttctttcaggggaaaacagcttttttatttttttaagttggaatgaagtgggagggagcagttggccaaatgaagtttccctgcagttcagatgctggtgtgggaagccaagacatagggttaagagggatgctttctaaggtagtcaagggccctggcaagggaaatctcaaaactaaaagagagccattttatccttcctgcttcattttccttaagtacaaatgaaagggtcttttctcactcttcaggatctttagtttcccctcatgtccacaagagttcaacaagcatgtaagttaaaccctggacactctttgtttggatacctaaaagtcactcaggaaagtgaaccatgaaagtggggttagggggtggaatgcgatgattgccagttagttggtgatgtcctgatgttcacagggtccaggctactggaggtcattccatggggtgtactcagttcaaggccagagctcattaccgagagtatcataaagctatatcttctgagtgcggtggcaggggtgaggggggctatgtgtggctcttattccagacagggacaaacatgtggaacaaacactctgggccagcaggcagagcaggcggccacatcttcctgagcttcctcattgttgttccccggggagagggttttgtgtctgctgcctggacctaaactgggaagagaaggtaccgtcaccttcaatgaaggtgtatctgacagtaggggtgttggaaaggagattgcaacatgtctgagaagggctatcctcttccatttgaccgggactaactgggaagccaatatcatccaccaggaaaagcgcacctgggcattccccaagataacctgcaagtcctacatattcttccagggaatggtctgcactttcccaggggcaggggtgcctgagttaaggtcgtgggggcagtctccatctcccagagatgattagttattttctccgtgggtaagctatggaggccccactcagacctggtaaacaaagactccactgcaaacatttttgggattcaacccctagagccaacagcactcattttaccccttttacttaaagattaagttggatattcttcctttttgtcatcattggtctctcagtctccttacttcattaggccaaaatatggaatttcaaggaggggtgggaggggggcagcactggcacaccttgaaatagggaacaagtgttggctgctgaccccatgtggggctgaagaatcgtgtatctccatttcagacaatgcatttcaattcttgtcgtgtgcctttgtccatttgtataaagcaaagagctctgagtgacagccccagttagcctgcatgagcagatcctaataaaccctcccaaaccccaacctaaaaaaaaaaaaagccacatgcctgtttgcctgaggcttattattaagacaccttctcagcttaaacacttaaaagcaaaccaaatgaaatggcaattaagactgaattaccccttctatctatgagatgagtctgtggggccagccagttctttcttataatgtagacactgaggagcaaagcctcagtatttcaggtttatagctaccaccaccccctccaggcactaaacaacttggtggaggaagctgaattttgaaggaaggaaagctcaaaaactgtttgaaagtcaagaaatccactgaagagatggaaatatgtgtgcactgcttccttcctgccctctatttataaaatataacttccaagcatttaagggttattttgggggtaatagtgttcaaaaacctaatgctactgctgaacggtctacaccccaccaccaccagcagtgtttccaaaagggaagaagaaaaacacaaaagaggggggatatggtttggtttggggagtgaaagacaacagtttacctaaatgtagaatcttgtcttacatctttattcccttgcatttttcctaaatgcattgccagttacaccatttcctgatgatggaaacttgggactgtccatcaccattatttatttttaaagctgctgaaaagtgtaagccaccgcttgattttgcctttcaaaaaaggggaaagaacccaaattcaatgtaaatatggaaagaccagcattgtttccacttgggcgaaggcagacaccccaatctgggcaaaattgattcgggtggttgttggaaaaagcagctttcagcatccagggagtggaaccaataggaatgaacacttccccatataaaaggaagctttaattaatatatatttctatctctaatatacatatattggagctagagctctagcttcacaataaaatgtgtgcaaatactctccacagagataagtccccacctcagtcggtatagaaaagcatgataaaggttggaaaaaatggataaaaatgttgaaagaacctccagttccttattaggcgaagatacaatatttattccttgtctcctgggataaatctcttctgcctattgtcctcccagttctcagtgctgatgcttaattttcaaaacttctatattaccaagggacctacgacatcagccaaagaaatactcagcaagtacaaaatctgttccagggagctgcttttgtgcagagggaaaattttgttcctacaggtttttaagtgggtacgaggcaaggagctatctgatccgggcaaaaccattacaatttagatatctacctatagaacattttttttttcctttaaaaattggaaaatacaagaagtttggatttttttttcccgattctttttttggagggggaaattgcatcgtaagctttcggagaaacccaacatgtcaactacctttccgggactagtccacgatgccgaggtattattacttttttttttttttttttttgagcgcgcgtgtgtgtggcggcggcggcggtggcggcggtggcggcggcggtggcagcctcccctgtctctaatctatattggaccgttacgtttaattataatctgtctttcgggggaagttaaggaaggaaaggggagaaagttcgttatgacatctgtcgccagggagggcaactctctgccacgttaagaaacatttgccataatgagcgggaaaacataatcttaataataaaaggggggagtgaagagaaagagatagagacggaaagaaagattctcagaaaagcaaagaaaagggactggtggggaagcagtagatgcacaagggggatggggaaaacgcaccccttttggaatgggcttattcaaggaaagggaagcagaaaagagggagtcggattccctccctcgaatgactaaggaagggagcaagttgaacgatttgcacagactggattttttaaaatatatggacaatgattttgagcagcccgggccgaacatctcggcatagacaggcgcagaatttcgatgctggggtctagttagagtggcaaggcgccccgggccagcgctcttttcgggtggactcgttcctctgctacccgcggccccggagtcagttgcaaacctggatcccaacgccaagctccctgcacaagttgggcaggggctgtgtgtgtgtctgtgtgtgtgtgtctgtgcgtgtgtgtgcgtgtgtggtgtcacccgcacctatatagggtgggggattttttttccgctctctcgactgtgaggacgaggccgcccacccccagttcgcctgtttgcaaaggctctctggtgaagacgctgagacccggcttcggctcggcccgagtcctacgcgctcgctttccttggagtgccagagaaagctcctggctccgggagagcggcgccttggttgcaaaatgacaaacctcaagtttttctgctctcccttttccccctcttccttccagatacgtcacgacggatcaaacagctaccgtttgatgcagcttggctgtctggagtcagtagccaattccactgtcgcctattcctcctcctctcctttaacttactccaccaccggcaccgagtttgcgtccccctacttctccactaaccaccagtacaccccgctccaccaccagtccttccattacgagtttcagcacagccacccggccgtcacccccgacgcctactctctgaactctctccaccactcgcaacagtactaccagcagatccaccacggggagcccaccgactttattaacctgcacaatgcgcgggcgctcaagtcgtcctgcctggacgagcagaggcgggagctgggctgcctcgatgcctaccgccgccatgacctgtccctcatgagccatggctctcagtatggaatgcacccagatcaaagactcctgccagggcccagcctggggctggccgccgcgggagcagacgacttgcaggtaaataagcatgcagcgaatttgtctgctccctcccctcttcgccctccccctgccgccccattaatgctccgactgtaaagcgtctctctttctctctctcttctcctctctctctctctctctctctctctctcacacacacacacacacacacacacacacaccacttatggaaagttatcaaaacaattagaggaggagtgtgcccgttctcttcctctcattggatccaagcatttcacctggaagtgcgggagtccgggcggctgcggccctccatctttggtttgtcctcacagaagtcttttgtgaatcaacatttgtgaccctgaggggatgaggtggaggagatcgaggagtctggggttgggccaaccggactcagagtaagatccaataaattgatgaccaatcgtaccctcaatctccgcactttacagggtcttccgaggcgtcccaggtgtttgtctcagactgagcttgtggagatcttactacaaacaggcttgttctaaggaaattgttgggaccctaagcttgaacaaaagtttcaccaaatacactagatatctgtggaaagtaaagaatcgcaaatgaaagtctcaaagttctaccccaaggaaataatccgcacagtgcactttgccagggtgtagggttgagtttaattctctccgcctgacgtgcactcaaaaccgcagcccagttaggtaatttacaagtttatttttgctcttccagccattacattttacgtaaaatgcacctccttaaaaagataaaaatgaggcagtaacggtaatgaaagagggaaaaaataaagaaggaaggaaggaaggagaaaaggaaggaaggaagggagaaaaagaagaaggaaggaaagaaggcaggtattcagacactgtggaggccatcactcaatcagatgatctctcttctactttatttcttaacacgtgtttgcacattctttaccaaagatagaatttataattatgcaattatgttgccataggcatatttcaaacaaatgagcccacaaatacccagaaaataattcaaaagacccatagttttagctccttttagctaaaagtgcagttctacctgtgagttcctactttttgtgtctgcacaaagctggccaccttcttcacactctccaggacaaatagggaaatattctaagaacataagttggagacgtaagagatcccttgttgcgcacaaaaaatctttcctcctcatttacctttgagcaagagattatttttaaattaaagtgaaagcccttacagtcccaacaaagagccatagcagtaagaccggtgcacaagaaaaaagatttggttccataaaccttgactttctacatttatattcacaaaataattttatacgctcagggcatttttacatttttcacaaggatccccttatgtctcaagagggaaaaaaatctgccattcagtgcttagctcaactaaaacctatttactccttttaatagccgcgtctgctgctgatttttttgtatctgtacaaattttttttctgtgctaggcacaaagccgagcatttttcaaaagagcggattagaacatttgcaagcactagacaaagagcgaatcccgtgcaaaaggacaccgtagtttatccaattttcgacttagtgccattcaactggtcatttatgcaatgtcatccgaccaaacaacatgttttacttatgaggggaaaaagtttgttaagtgaagaaaccaagattcgtttcttctaagaaaataaacattgtaaccgtgcgccagagagtgggagggaaagtgattcactgctttggagagctttgagaccatttatcatctacatttcagatattttgaaagcttttcttcagcctatctctttttccatatacgaatgtcctttttctcttttattactcatactgaagcaaaattactcatactaagggacacagtccaagatactagaagaaatatagtactgtgtgtgatatacgtttatacctttacatagatatatccatgtatgtatatatcataatatatatccatctttatctatttaatctatgaatgctatgtagcaagtttgtaaatctgacaagttattttcttccactgttcttgctccaagttggcagaatgaaaaagaaagagtcatagctacttttaaaacaagaaatggggagggagtgtgtgggagaaacccgtctctctccttttatttcttcctttttaaaacattcatcagcatatgcctcatttcaaatgcaacaaatgtaaatatacttttccctgcacagaattttaagtgaaagtccaatggtttggagggcggtctaagtctgcctaacagatgcaaacagtcttgtggcttcagttccatctttgagtcccctaaaaagatttgctatggccaacaaaggaaactgtcacaccttttcccatcaccgctttaatttatgctcagtctccaagttttttttttttcatattgatttgataatcactttaaggcagaacatttaaaataagaaagagcttgtgagtaggttgaaaaggggggtcttacaggcctgcctcaatatggtgaaaatggggaggcgaaagggagccagggttgtaaaggttgttttgtaaagtgggtttttattatgcaccgactctctccgcatttacttaactcttcacgggctgttgggtaggttaacacccttcaaggcctctttcatgtccaatacctcgtttgtttgtaaaggaaaatgagcctttaacacattttgatttgggaaaaaagaaaacgacagacagggagaaatttttatttttcctaatcaaaaatcagcaaactctttccatctttccagctctagggattcctcaatccattaggactttgaaggcctacagtgagtgaacctgaagatttttccttcatacggcccattttgggtaggattacaggatgttcctacatttggggtaaaacagaacctccataagacatcttgtatcctgcatatgaagtagctcctctgtgtcctc

SEQ ID NO: 436 - DNA, 8060 bp, Homo sapiens
cctttttcttttagggtagggaaggtggagagcaccccatatccagcatagaacgcaacagactgtcttcctccggtgatttttctttcccctttacttaacttaccagagctgggaaaaaatgagtttccccaaattaaatcaaaagcacaagaaaggccggagcggctggtattctgaggtcagatgtaggctgcagggagagaacttgatcagggccagtgcagggagcccgagcactgagaacccggcctgggagcgcaggaaggcgggtggtgagcaattctacgggtgtcccgagggtatgaggggcggtgctgctgggaagccgagcggggcatcctgaggtcagggcgccagaggctgcagaaccctggagggtgtggctgcaggggacgcccgggcgggacaaggcaggtaggagaagaacccagaggtgtgggaagagggtgtctccgagtcagggcgcagcacggaagtaactctggggtagaaggcgagggcggggcgggggaaataaactccacagagacaataacctgctgctgccccccaacaccgactcaaaacagcgaaactcctggccgccgccctcccctgcagcgcaggccccagttacccaactcctcccctgcgctccggcgcagagcggcgcaatctgcccgccccgcccgcagcctccccttccaggccccgggagcattcccaccccgacactcacacaccggcaaacaggaacacacagtcaggctccggcccggagtcctcggcctcccgggaggggcacccgacatcccgcacgcctggtgccggaaggggagagcgtttccaatctcctggacgacagaaccagagaaagccgtgtcccagccctctctccacagttctatttgattttactaccttcctctctttccttctcattcacttttcaattgtcttgcaacttgttttccaggcagtttctctttttctctatcctccccaaacttcttgtccctccccatctcgtcgcttgttttttctcttcctcttcgcccactttttttctgcctcttcccaaattccacgctttgggcttcgcgtctgtcgctcaacttcctttttctgcaccccgcgatccatccaaaatgttcttcctgtccctgggattgggcagcctcagcctggcccctttcagtcgcgggagcccctggcctctccaacaggagagagagaaggtagggagaagtggatgggacccccggcgcccgggagccgggcagagagcgccccgaagcgcgcatttctcttcgccagcgcccgggctgcgcgggcccacgcgacatctgtcgcctgcggtcccggctcacaccccgcgcacccccgcagctccctgggcgctgccaccccccacgctccggctgccgcctttccccgcgggcgcagacgctcgggcctcgccttcaggcgccgctccaacttcccagggtgtctgcggcgcgcggcggggctcgggggcggggacctaagggcggctggctatgtcaccttcgagcttcaccttccggccctagacccatctatggtgggctcagcctgattctctctccctcattctctgcagcgctcctcgctactccaggatccagagtagtaagacgatgcttacgctgtgtgcttcctcaaagcgcctagcacagtgccaggcgcacagctagggcacaatgatccccccaccccaagagcctagtaccttcctcccactgataccaaccacactaggtgctcagtacccacttcctgtcctaagttctcaacacatgacctccctaaacagtgcccagcaccccgaaggagctcaataaatgttccttccttaaggcttcccattggagtttccctgaaagccccctattccagcccactccgagggcgtctccttcccgtagcagctacaaccgtctggggagaaggaagccaaactccttaaacaggacacctcactcgagaaggagcgaagttggcagggcagaggaaaattgcaaatgcgcggagcttgggaagaaagattgggccagccagaaacctggagggggaggaagtctcgagatgcgcttggggtgccagataatggggatcagagattggagaagtgacacttagggacaagaggttgggagcaaaggtgatggagacgggggcgactcaggaacggcaagaggattggaacgggaccggggacctttcttggaagtgcgatagattttaagtatttggcgtggcttacaactacattcccatagcaagcacactttttacttgcattgtgtgtttatttgtggggctggtggggattatggaggctgaagtcctccgcaagccactgagctataagtgagtagcaagatgcgcttaaggactcgcagagatgggggcagaaacggtggaccttacacttggaagggaagactggggactgggtagaagaggagaggtggagatgcttgcaagagaagagaacggaggaagaaggagaagggaaaagaagaaagccaaacttgccactctcccgctcccgggccagcccagcgtctccagtgcccagctgccgcgccccggctctcgctcgctcgctcgcgtacctgttgctcgctccggctgggtctcggctccggccccaccaagaagccccgcgttcctacaagttccgcctgccgagcagccaggccgccagcgccgccacctgcgcggccgcgcacagccaaggccagtaggtggggagcgcgccgggcgccggcgccctccggctccgcgcgcggcgccgccacatggtgcgctggtgcagctcgtcgcctagcgccttgagccgggcggcggtgagctgcgcggcggacgagcgcagccccaggcgacccgcgctgcaggcgcacacggccggggggccgcggccgcggtgcagggggcacgggcacatgaccgctggcctcgctcccgccccgcgctcgggccgcccctcgcctcctctccctccggcctctgcgcccgctgccgccgcgctccagccgccgggggcctcccctggacaccaagtttctccttgtgttgtgcgtttgttgtgctgacggcgctattattaattaaagtgtcacatggtggaggggggcggggaggggggttacatcatccggcccccgggggttggggggggggctgcaggcagaagaaaccgagaggtaacttttaaccctagcggcgccggcagctagggagcgcgaggtttgggagacggggagcgcggcgcggggcggcgcgagaaggctccccgcagcggaggtcctgggctttgggggtctcgggggacccccgcggaggcgcggagcgcgagggaaggttgttctccttccccttttcctgaattcagctcgagttccgatttggcgagggaaaaaggcttgtttgccgttttggatgaagctgatgctgaattcggctgcattattcaaaaatattccgaggctgttgttttgtttgggggaggtgggtggattcaaaatcttatggaagggtcagattacacccaacttgcctcgtttcaggtctgacttggcacctgtaggctttcagcctgaccctaacgtgcccccagcgcctggctagaaacctgaccctaaagtgcccccagcgcccggtgggaggctggatgggcccacctgagctcgcgtggggcgcggacggaggcattctcgctgcccggcacccgcacccaaaagaccctcgcaaggggctttctaaagggaaacttcttgtctgctttctttgtgaacattattttcctgatggcgttacagttttctgcgatgaccccgatttaatgcgcagtggagaccctaaggggtcggcgagaggaggggcgcgggggactttaattcccccttttccaatccgacagccactcctgtgcacctccagactggagcgtctgcagttgtcacaaacggtgaaggttcagatgggctgggcggctgtcaggattctgtgggggagaatgaaacctgtgatcttaaatcgactgggattcagacaactttgggattcagaccatcgggatgagtccagagatggctccaagttgggagtctggaacctgctgagggagcttccgttcttgccttcccaccgcagagtataaccaagattcttcgagtctgtgaacttagttttggtctgaattgatcaggaggagaaatgtcccttttggcccacagcgtggtgaaatgacaacaaagtcagggctcaaagcccacaacactgtgtgattctggtggccttttccctcacccagctccaattattctaggcttcataatggccaagacctactgcgcatcttctatgtctggcacctgtgggctttgggcgcccttgcctctgctgcctaaaggtaaatctcccaacaattctacatgcaattactataatatttcaaagatgaggaagctgaggcacaggtaggtaagggttcttgccctagctcacagagtagctaagaatgaaaccgtcatctgaactagggcagtatgccgcaggctctaagctcttaaccacggttttatactgccccctgtaatctgggaataataatacctccatcccaggattggggcagagattaaatgagagaaatgtgtgccaagcacctggcacgcagtgggccctggatagaccttggttccctttgcttctcgccagaaccacttcccattctcctgggactcacctccttaatccccctagtctttacagaggggacctgatccattgcccgggtgtagcgttccaagaatgaagacacagtgtctatttaaaaagccctttggatttaaattgaacaattccctccccccatttttaatctgcacgcttttaacggctcacttcatggacattaattttaatgggacgattattaccctgtttggaagcctgcccctcgaaatgctgggctcgcaaggtggcgctgggtcgggtcccagcagcttggatgttgtctgtagaagagggggtgcaatcttggccgtggggatgcaacgttcagcagagggggaagagaagggggtgatgaaaaagtgggagagaaggaaggacctctctctccctgacactcttaagtctggcagtccttaatttgcacacatgagttatcctgtgctattggaccacttactaactggggagcatggccttgagaggtggctttttggagcctccattctctcaactgtaaagtgggaataataatagtacccacctcccagcctaaataccaggaaagcccttacttagcacagtgcctcctggcccatcattaggttttttgttttttgtttgtttgtttgtttgttttttagacagagtcttgctctgtcaccaggctggagtgcagtggcacgatcttggctcacagcaacctccacctccaggttcaagcgattctcccgccttggcctccccagtagctgggagtacagacacccgccaccacgcccagcttatttttgtatttttagtagaaatggggttttgccatgtcggccacgctcgtctcgaactcctaaccttcagtgatcctcctgccttggcttcccaaagtgctgggattacaggcatgagccaccatgcccggtcccatcactagcatttaataaatgttgactactgttaatattttagagtggatcatgtagttgtcaaatagtgtactttgaagaatgttggggatccacaccctcaaatatatatagttcccctattgtgaattggtgattccattgctgatattaagcattgctcaaagaaagcaaattctttgggagggtaacatgtctcctagcactttttaaattgtcttaatttttattaaaaaaaattttttttttaaatggtgtttctctctgtggcccaggttggagtgcagtgatgagatcataactcactgcaacctccagctcctgggctcaagcaatcctcccacctcagctctggagtagctgggaccacagacacacaccaccacacctggctaattttaaaaaaacttttagagatttttttgggtcttgctatgttgcctaggctggtcttgaactcctgggctcaagtaatcctcccaccgcagcctctcgagtggctagaactagaggcgtgcaccaccgtgccaagcttctcctaacagtttagtaaaaatgagttgtcgatttcaatgtttaacttaataagcacttatatagtgctcgctctgtgccaggtgctgttctaagttctctagacacataactcctttaattcccctaataaccctatgagacagatactattgttagcccaacgttatgtatgcataaaccaaggcagaggggttaagtaactcatccaaagtcacacacctgccacgccccagagtttgagccctttagaattagggtgacaaatggttactggggacttgggaagagggagggaggctgtagtgggatgaattctgtcccccctgccaccgctccaccccaaattgataacccctggaacttcaaaatgtggctatatttggagatagcatctttaagtaattaagttaaaatgaggtcattaggatggacctgaatccattatgactggtgtcctcataagaagaggaaattaggacacagacacagacacacagaaggaagaccatgtgaagacagaggaagaaggcatctaccagccaaggagagaacctagaacaggtctttccttcacagccctcagaaggaactaaccctgcccgggcctggtggctcacacctgtaatcccagcactttgggagacccaggcgggtagattgcttgagcacaggagttcaagactagcctgggcaacatggtgaaaccctgtctctacaaaaaaaaaaaaatagctggcatggtggtgtgctcctgtggttcccagctactcaggcggctgaggtggaaggattgcttgagcccaggaaatcaaggctgcagtgagccgagatcatgccattgtgttccatcctgggtgacagaatgaggagtgaggcccagtctcaaaaaaaaaaaaaaaaaaaggaaccaaccctgtcaactcattgaacttgaacttccagcctctagaactgtgagaaaataaatttttgttgtttaagcccctgagactgtggcatgttgctatggcacccctagcaaacaaatatagagaggaacaacatcctaaacaggaagctagaagcagatatttcaccagactctggctgcttttactgtggggcacatgtgaggacatttttctgtgttcttgggaaggatgggttctaggactgtttgcctgttcctcttttttttttctttttttttttttgagacggagtcttgctctgtctcccaggctggaaagcagtgatgcaatctcaggtcactgcaacctcagcctcccatgttcaagcgattctccttcctcagcctcccaagtatctgggattacaggtgcccaccactgcacctggctaatttttgtatttttagtagacacggggtttcaccatcttgaccaggctagtctcgaactcctgaccttgtgatctacccgcctcagccttccaaagtgctgggattacaggcgtgagccacagtacccggcccctgcctgttcctcttcttcctcattggtgtcctgttggagatctttaagggaggaagagttttaggagattattttggaaaacagtttgtggaactccagttcatcatacagggaaaacttttctaccagttgcaaaaaatgcaacctctttctcatgaagtaaagaaatgggaaaggctttctagtccatgaatgtttcctgtggtctcccggcttaaaaccaggcacacagcaggcactcaaactttttttgaaatatagactcaggccggactcagtggcttacacctgtaatcctagcactttgggaggctgaggtgggcagattgcctgagctcaggagttcgagaccagcctgggcaacatggcaaaaccctat

SEQ ID NO: 437 - DNA, 8060 bp, Homo sapiens
gttcacctataaagttagagaactgggcagaaagaaaaacctattgattacgttacttttgctcattgtttaattcctgacccttcttgaaatagctgcccaacccctacgaaactgtcatacctctctgatggcagttgactagtaataaaattcaggtcaccatctattacaggccagagagtctgactttcagcatagtcttagtgaccaaatttgccaaatgctatagaatattccaaaaacaaaaggtttcattccttggtatagatagtgtccatctataagataaagaaaattagatctaactcatacaattggtgtgaagatcaaataagaaaatgtggataaagtacatgagccataagtaatcaataagtgtcagtggccctcctgtgtgcttctcagctcttcctcccctccgccatttcttactactataacctggatttcccttggcaatagtccttttggacttcccaaaactaggaaactttttgctgaaagcagattattctttgtttagtggagtataatgtagtcctctagtgatcagaaatggagtaaccatttttttcctcctaaatactatttggcttattaatgacttgctcctattatggcatttctcacattgttttatagggttttttttttttttgcacatatttctttcatcttgatttcaaaatatagaaaggcaaagactctacattttcttcttcaaatctatgacacagtattagtgatctattgccgcataacaaattactctgaaattcatcagcttaaaacaacacacatttattttctcagagtttctcagaagcagcttagctgcatagttttggctcagggtgtctcacgagattgcagtcaagctgtttgctggggcgactgtcatcatttttcatattcttggctgtgtcatataatgttcaacagagtctctctctctctctctctctctctagttctcatttagattctatatgagacagaaattccagagccaatttacttttgaaaaacccctcaaattacccctaaaacacagtctatatccctttcaagatgttgaacacagtgaaaggtctggttaaaagctggggagaatagtgggcttagaatcagaggacatgttctatgaaaaattacataattttaaatacaagaattatatttaacttagctacacagacacacagacacacacatacacacacacacacacacacacacacacacaagaggcattcagagactgaggaggctgagggtacaaagtttcctatctcaccttgaccacaggactcactctcaattagtggattagcagttgcaatttaaaatttaaaaagttgtttatttatttatttttgccaagttgaacctgcatacatgaaatacattcatgatttaaccctgacatattaatattaaaaggtaaagaagttttcagattcatctttaagtgttctctcagatttgatcttatgctttctctgtccagcatttctgagctttgctctgcttgctgattgatgctaacaaagcaggcctcagaattgttctagtattagagccactggaagccaaagtgcttcttgcagaatatagtattgttatgttgtattccaatcacacagataatactttaacacaaaattatatttggttattttaagtttatattgattagggtcattacatttaattaaatttacacagcatgaaaggcaatagtgtcatgatcgcaagtgtaaaaatccaaacacacacacacacacacacatttgattcataggtttttgaatcaaacctatcccttaatattggtttgttgtatgatcattcttctagctaccggctagtcctctctggcagataatcaatggcacctgtcaaaagtttaagatgcataatattttttaaaagtattgtagaaaaacaagtttaagaaaaatttccttgagttatttttccccaaactggaatacagttacattttagccaaagcccttgcgttcgcttatagaagataaaccttctgttgcaaccaaggagacaattccaatctatctcatgagctgcatggaaatctgaaggtcaaaaaactctgaatgtctttcttctgttatccttgttaaaaaataatatatcccatctggaaatttggagcttgagtcctctgtggtaagtgcttcctttgttgttatgtaatctttattttctaaattctttaccactagttgtgtaaagttggtcctgatgtaggtacagacatacacacgcctcggttaagagtaaaggttttgaataagctggcttctctgaccagaatattgctagaatgtaagcactgtgagtacacaggcctccatatattttgctcactgctgtttccctcgagaagtccctggcatttggtgaaggcttgatcaatatttgttgagtgtttttatggttgaaatcattgtttatgttccattagctttcaccatttttttttcatacctctgtattagtttcctagggctgccataacaaattaccaaaaacttggtggctttaaacaacagaagtttattctctcacggttctagagtttgtaagtctgaaatcaagctgttagcaaggccacactccctccaaggctgtaggggggtatttttccttgtctcttctagtttcttttttctggtgaaaagatacatatatttagaattagccagccagactcagtttagatgatcccaattttgttggcaacatccaaagcatcataatcaggacccagaagaatatgtgccttcttctctctatcagtcctaaccagggtgttgaccttggccacatcaatgtcacagagctttttcacagcctgtttgatctggtgcttgttggctttaacatccacaatgaacacaggtgtgctgttgtcttctgtcttcttcatgggagactcagtggtcagcagaaacttgatgatgacatagtggccaagcttgtttctcctgggggtgctctttcgaggatatttgggctgcctctgaagtcacagtgtcttggtgggcgggggtcgtgcagattttctttatgtgtgtgtgtatgtggctgtggacacctttcagcactgccttcttggccttcaaagcctttgctttggccttggctttaggagggacggaagcttccttcttcatctttggcaccatcttgtgaaaagctctcttctagtttctgatgtctccaggcatcccttggcttgtagctgcacaactccaatctctgcctccatcttcacatggtcctcccctatgtctgcttctgctcttctttttataagcacatttgtcattggatttggggcccacctagttaatccaggatggtttaatcttgagattcttcacttaatttacaccaacaaagactctttttccaaataagatcacattcacactcacacgtatctgaagttggaacttggacatgtttttcatggccacgatgcaacccattacaatgtctaactaccaatattaagattctattcattcaacacacatttttaaaatatctattatgttccaggcaccaaatggtgaggatgcaaatatcagcatgatgtggccactgtccttccttagccagatgacaacttatcaaaggtttttatcctaatccttctgtaataaaatatattttaaattcacataaaaggatatcttatctactctgaatcccttcgtattaatttttccataaattctaaagaacactcttcattgttactttttcaattgtcctattattcatttttcagatgttattagctcgaggtcatttctttcaaaaaatttcatgatgtgaaaccattttaattagtttcaacatattttctttcaccacaagtcaaagtacaggagcagtaaacttagcaagaacccattcatccctgtaccattttgtcattaaggtaacatcaatatccctccggctgaggttagccatatcttatcatggcctggtttctttggaaagcagagcctgagaacatataggtagtttatttgggaaataattccaggaagcaggagtgtcagatgggggcggtttggaggggaacaggggatcagggaatcaagagggagaaactaaacaggaatacattgccaattgagccctcacaatgcagtaactggtttttgcccccgtaagactttctgatttttttttttttttgagatggagtctcactctgtttcccaggctggagtacagtcactgcaacctccgcctccccagttcaagcaattctcttgcctcagcctcccgagtagctgggacgactggtgtgtgccagctaatttttgcgtttttagtagagatggggtttcaccatgttgatcaggctggtctcgaactcctgacctcgtgatccaacagcctcagcctcccaaagtgctgggattacaggcgtgagccacttcgcctggcctactcccttactttcttagtaaacttgctttcactttactctgtcatctcacttttgatttccttcctgcatgaaggcaagaacccatgtgacctcccaggctgcacccccttgaggttcaccctgtgaaagaatgactcacaggactcaggaaaacactgtacttacaattactcttttcccataaaggatacaaatgaatagtcagatgaaaaaacatatgatggcaagatctggaagggtcttgagcacaggagcttctgtccccatggagccagggtctgccaccctcctggtacatcaatgtgtgcaccaactgggaagcagttcacacctcatcattcagagcttttattgaagttttattatgtaggcatgattgaatcagtcattagccacattagcctcagtttctggcctcccctcctcagcaggcagggactggggctgaaggttccaaccctctcaccacatggttgattttcctagctgccaccccccatcctgaagctctctaggggctctgccaaaagttaccttattagcatatacttggatatagcaaaagtggctcattatgaataacaaaagacactcctgtcattaaggaaattccaagagtttctgaaactctgtggcaggaaacaggggcaaagaccaaatactttttttttttttttgagacggagtttcaaaacttgtcacccaggctggagtgcaatggcgtgatattggctcactgcaacctccgcctcccgggttcaagtgattctcctacctcagcctcccaagtagcctaaatacatgttttgattattcacagtacaacacatagggagtgctcactgaacactgacgattgttattctcgaggtgtggaagctgtgtcatagaccacaatcatcacaaccacccctggaacaaacacctctgctgtgttaacttttgaattaaaaaagtaaatcttaatttaaaaaaaagaattttcaggccaggcacagtggctcatgcctgtaatcccagtactttgggaggcctaggcgggcagatcacctgaggtcaggagtttgagaccagcctggtcaacatggtgaaatcccgtctctactaaaaatacaaaaaattagctgggtgtggtggtgcgtgcctgtaatccctgctactttgggggctaagataggagaatcacttgaaccgggagatagaggttgcagtgagccgagatcgcgccactgtactctagcctgggtgacagagtgagactccgtctcaagaaaaacaaaattcagagcagaagatttggaaatgttacagatcacaagctctttggtttcccatgtaataaaaattaatacggggccaggtagttttcccagtcaaggtttttattttggagcttgtgctcaagctcaaggaagacagtggaggtacaaggactccctgaaaaagctggttggggcttttttattaggcaaagcacgggaattaacatcaggtgtagggtatgcaggctgggttgggcaaagcatgtgaggggtagattattcagttagcatatctggttgcaatgtttatcttgagtaatggaccacctggtggtctggctggcagcaacaaagctgtaaatcaattgttcagcattccttcccaaggtgggacagtccacaatatttagatttcctaagccagtttctggaattctttacgtaaaaggcatggttacatgttatgaaagcgcggaagaacggctgttttctttgtgtgactaaagccttgggattcgtgggcatatcaccagcgagtggtgtgggttttgtgatcagtggaactagagaaaaagaaaaaaaaatatgtgaaggaggagctgcatcccattcctattctatctcagaaataagttaaagcagtaccagctcaagttaacttcctttgacaaaatgtgggaagcaactatattctaccaatgcttaaaacaaaaaataaaaacaattattttttcagggtgtctaaattaaggcattgaactgaggaaggttggattacctacaagtacaataaacagttcttgtacttgaggagttaaaattctaggcagggagaaatgacattaacatggcactaagcagaatgaaggataaataaggggtaaaagagtaagtgaagcactattgcaaggcagctcttgagtacattaataaatgaattctataaacagtaaatgccaatgaataatgactccaggtttgggaaattaagaaagtgtttacaggaagtttcagtaccaaggttgattggattgaaacctttgtcaggacagcaagaggacattgaaagaagcagaagtacgggagcaaaaatttaaagacaggaaagacaacgtgtggtcctgggacgattagttcacccttactagtgttttgggtttaaaacgagcaacacaaagctagtaatagcaatatccaaattccaaagaatctcatgtttattcatgatcttttcactatgagtagactgtgttgatctgttagcgagtttattgtttcaaaggaggaaaacatattgaggtcagttacagaaatggaatatttgaagtcgatgaattcaaggaaatatattcaggtcaccaataccttgtgcagaaatagataaaaagaagagggtaaaagtgcaaattatttacattcttgaaaccacaaaagtgaactgagccaagaacacagctggaatgtgacccagtggggtagggagtcccacagagcctgaacacaagcccacttaggcttccttggttaagacctgaacttccccatctgataatgggaaaaaacacatccaaaggaagtaaatagtaattacatgtggagctagtggttgtctttctagttccaccttgggattgaggttacaaaagataacgtagagagaaaacattctaaagttatttataatagagttaaattgaacttaattaaatgtttgtttgagagtttatgggcccgagtggatttctctccctgaccttggtcaaagtcagtctataataaatcaagtgtagcatatctacatggtagtgcatattccttttttttttttttttttttgagatggagtctcactctgtcaaccaggctgaagtgcagtggcatgatcttggctcactgcaacttccacctcctgggttcaagtgattctcctgcctcagcctcctgagtagctgggactacaggcactcgccaccatgcccggctaatttttgtatttttaggagagatggggtttcaccatattggctaggctggtcttgaattcctgacctcgtgatctgccttcctcggcctcctaaagtgctgggattacaggcatgagccactgtgcccagccagcagtgcatattctattggtattgctacctgaaggaagctgggaaatggcaggcttattcttctctccttaggattatagccactccaacagccagtgcacccatagagagcagtgggaaaagcacaaaagtcaataggaatggctaatcatttcatttagcctttacaacacc

SEQ ID NO: 438 - DNA, 8060 bp, Homo sapiens
acccactaaagataagcacagttggttgagagtatggatggaagaggtcaaaacacacacctggatagtttggctctggtagactttaatcacgtgaaaactgaaactgtaaattccttttcttggtgctacaaagacagactccaatgtgaaaaaattacccacattcaccaggatctacaaataaaaataataaataacaataagttattatattttcttctgtaactaaaatgaattttcttcctctcactctcttcctctcctcttccttctttccctccttccttcattccttccttcctctttctttcttttcttttttcttttgttcattcattcattcttggcaactagcttaagaaatcatagaaaataaaacatctagttctgtatctttcctcttaactgatttggaaaattgactggaatactggaaggttcttctgtcttttaaatgatataagaataaataaagtaactgctttgtattcatgtctcaatttccagcaaggcccaatggctctggaaacatcgagctaacatttgagaacttataaatattagctttaccttgagagttggataaaaggcacccgctatgtgtttacattcccaccttctacaagcctttgcaatgtccagaggtgacgtttccaagccagccaatcagcatctgtgagctctccgcagcatccctggacaaaccacagaggcatgggtaccccctccaccatgtgacataatccttgacactgaacagttggtgcacaaagtgatctgaatgcctggcccttctctgagccaccaccacccctctcctaagatctgttaccattttttttttcattcctgtgccagctaggccttaattataataatgtggcaatgagtcagcccttgtgggctgccaaagaggagagcatagagaaggctaaactatgaaataggtggctttccctgttcctccccgggctgtccattaacctcctatcaatcacctgctctttatttgaagttcaaggttcaaaagtgaaattagatactgtttcccaagaaagcaacaatgcattttgtattccaaaatattcagcctagttctattggttataaaattaactctaaattttaataagtgacctcttaagctaaatttgcaatgtcacatgggtaagtctctttctatgagaaagagggattgggatggaggatggatgttaaaataaccagggtttgttccatttctttccaagaaatacacctgtaagtggcattcaaaaataataagaggtccctaaaaagatatacttctcatatatcaatggcaatctgctactatctctttcgaacactgcattcttgccaatattaacacacttgcaagcctcttgcataattccctaaaaatgtactattacctctgggcaacataccagaatgtagtgacagtcaagcagatgtatcaggctcaacacctaacttaaaacacatgtacgtgtataatttcattctgagatttcgccttcttccaagtaagcatcagattttttttgtaacctgatgatagatggtctttcaacaagtcaccagctgtgcaataatccccagcagaggctttacaaagaaatttttcaagcacaattaaaataatttgaggtgcttagtggtgacttcctgattcagatacaagtagcataattcattagcaataatgaaaatagctgattagtgttggctacatataaaactggatgttgactctacactgtaattggagcatccaggtacatcgagatttataaccaaatgtgtgttcttgtctctaagatgcaaggctcactgaaaagaagaacaaacccttttcctcttctaattgatggaaaggtcattgaaaggaacaccctgtatagaggatagtgcaatgcccacagtattccaacatttaattaaagcattgaaatacaaactaggggtggtgctagactttatttccatcaagatggaaaatactgcaccaaaaccccaaatggagctacttaattctttaaaaattatgtctatcaaatactaagcccctagagaggcattctctgtctttggccagctggagagtgcattagttaggaaaaattaagcaaggaatacagatgtcacctcgtgctttccctggcacatcctgcaacaccacttaacctgtgccccctgcacattgcagctttgcatacaactgtgaactgtgaatttggaatttaaaaagactctggatactgttggggctgaaattaaaaactctgaggacagttttctcccttaagaccccttgctaaaggtaagctgatatcctggggtttctcatcaagccaaacacggagcaccaggtcgctaaacagcagctacagcttccgtcagctcttcccctactctcatcaacctcaaagtctgtctttccccagctatttgcaattctctgaaaggacatgagcccgggaagggagaactggctcccaagcgctttcctacaggagctcagcgcagttgccaaattccttttcctcccctcctccgcaacttttctctaagtaccggagaagggcttgctgcctactccgaggcagcggcagtgccagcggtgcctggcacacgaacagtggaacctgcaggcgagatctgacccccggctctgcccccgccctccgcggccacctgcccgatctctgaagagtgtggaagcccggggctctcttgggagagaagcttctctacctgggagaaacaaatcaaacatttatcctgttccgcaaaggtacccagggagcagcctcagcggcacccgcagaggagtctgagcaagggcaccaagatctggccaagagataacgacgtccagggaccaggtgcccttcggctcccgccgacctgttgctcgaaacttgccctgagctctcgctgccgggctctgggctcccaagcctctcccccgccgccgcagcagcctcttttaggggcccggaagaaatgggagccggggctggtgagaggggtaggaagagggacggtagaagtttcagacccaggcatatttgggaaggcgagtgctttacatgattccccatttcccaatcggaccagcttagcctgggcaggcagcctcgtgctgaggtgcctggagaccgcccaccccctaggtgctcgcttccccccgggtctgacctgatcgaagtaaatgatgcgcgtcttgttgctcatctcggatggctcgtggttggtgctccgcaccgccgagaaggcgaccttggagttggccgcccggaccgatatccccagcggggaggaagaggagcccttggagtccgtggccgggttcgagtcgcacaccaccagacacttgccctccagcacgatgggctccgtgtcgttctgtgcccagacgggcagccccggcagcgtgaggaccagcagcacggccggcaccgcggacagcgcccggcgcccggagcccatggtgagccgtgtgggcagccgcagccggctggcgctggtgctcgcccgcgtcgcctcctaccccgggatcccggtgctcgggaagatgctagcggctaggtcgacagcgctgcaggagcgacggcggcggcggcgcgcacacttccaccaattctgtggcttgaagtcaaagtctcccctcgagctctctcgctggctctgttacctttgtcctttaaggagctcatgcagcaccctttaccctactctcctccgcccaagaatcagccctgcctggggcccctgcacccactctggttcctagacatctgaaagtcatcaaaccctcacattcacacctcaaggcaaaaaataataataataataaattctcaccccaaactcaagcaccaccagctaaaccacggagcaggaacaaaaagaggggactcaaagagaagccacaagggtggcgggtgcccagcggcgcgggtgccagtcctgtctggcttgcggcagggacgagttacagaggcagaaggtccttcccaggctgagaagaacgcgaggctgtgttcatggccaggacgccagcgactcccactttcgcctggtcaaaaaaatcccccaaacctggtgtcacccagaggtagggagggaggcagcggctagccaggtccctcgcaccgaaagcgcggattcgcaggatcaggtccagggcgccgggcgcagcgttcagggcggctggtccggcggggtcctctcctgcctggccgcccgcccccagtccctgcgcacaactttctcgtccctcgtgcagcccggagagcgcgaagcgggcacacgcgctctatttataggagcgcagcgtccggctgggttggcttatcgcgcaacccgcgggctccgagaaaagggggagaaggcgtctggtgaccccatctgagcagctctctcctgacgtttaacgcaccccaaagcaagcggggcgcacagcactggtgattggcaaggttcgaggcccctcagcccctgaaagcccgtggcgtaaaggatgcgtgcccagagaggagcccacggccctgcgctggccccagctccgcgcccactctctcctgctcgatctgagtccgcagaggaggcggctggtcccctcacccctcccagcgcggaactctgccgccgagtgccctccaagcggagcgcggcgctgccaggccgggtcgcgaaaaaggataagccgccgcggacccgcgctgcgcgctgccccgaacctggggaccggcgggcgtcccgaccgcgcctggccgggagcccgccccacacagccctggggcctggcgagctcagggaagccttggggcggaccagagcccgtgggggcggctgggaggaggtgcctgattccttccttccgctccgggaagatgagcctcagaagccgcaggggcgcgccttccccccacaccgcgaatcctccccaggcatggccaaaaaaaagagtgggagagggagttaactcagcaagaataagtcctccgaaaccgtgccaacaacaataaaaaaataaaaataaaaataaaaataaaagacaatcccactcctaggaatacagcatttttctcccctttggatgcgctttccgcccccgtgccactccactgctatcttggcctctgatttgcaagagttcccttcctcttctgcagctaccacggggaagggaggtttgtctctgtctggacccggctgcgtgaacttggccgagtcactaaccctctctgagaggggggcgcggcgttaactaaggtcctccccacccccatcccgccagctttccaattctgtgatgctgtggggtcatggcgccccttccccaatttcttctacacttccagctgccagagggcagacacgtatggtatctttaaccaaaacagtatcccctccaggcattcggagctcctaaaatggcattggctagttatgaatggaagggatgtttattgagggaggtccttgggatggacggctcccattccttcctgagtgaaggacgccctcatgagcgtggcattcgagccctccacaaaacaaggtgaacctcgtctccagcctttttcccttccttcagaagggccgggcattgagctataagcaccagctccaactgttaaaattgaagacactacgaggaatcccctaaccctcacctccctataatctctcaactaaagtgttaatacttggtgccacaggggccttcagattctgctccagtggggccagtatcaggtgttttgactttatgattttattttacttgtggtggggggtggtctcgctatattgcccaggctagatgcaaaactactgggctcaagcgattctactacctcagcctccccagtagctgagactacaggccggtgtcagttccggctggcaggtgctagtaccatgctatttgttaaaatgttgaaagttacctatctaagctacaaccaaacaaggtgaactagtgccttctgaagatggccaccatttacccagctttgatgccccaccctaagcccagcacaatcttcacctgatccctctctgcactttgtaactctcttccagattttagggatgtctgcctggttaacagcagcaatttcttctcatttgatgcagtcttttgagggtgggtgctgagttgaatttagttccttttatttcctgtaggggtaagcaccctgccttccttgtctgggacagctgttcaataactagaactttggttgttcaatttcaggctgggagaagtttgacaaaaaaaaaaaaaaaaaaaaaaaaaaaactgtgttgaattgttaaatagaaaataagctatcttcctcaccaattccaatatattctctctacctccttttcttctccaggcacttcctgcacgcaagaactgagatttgaagaaacctattctttctctcaccaaaaatattcatttttagtcccaaaatctgcatagtgaccatagtaaagactcaataattgagaaatgactgaatgcttcctaatagaaggtaattatcactcatattatagtataaactgctttaaatgagtctctctcagtaaaatttaaattcaaagcctccttaataattggggataagggtctcggttccttactaaaggatgttctgctcttcaaagtgttctgaagataaggaacacagcattttctgtggacccccgctaagagaagttatcttatattgtgaatcagagggtcctgactctttttcccacaacagttgattaaacacggatagcccctgggttctaggaccatcaatgcatttgataccagaagtccaagatttgtatggtccaacttggccagatgacttggggctgccagattttctctctgcaatcttaatgagacatcaaaatagcttccagtaagcactacatgtggcagagacaaggtttgtagtctcccaaactgacgtggccatgtaggagtcatctgcaagctgaagcagaagaggtattggaataaaccagaggactggccacacttgtagaaagaagccaattctggagcatgagcacttctaagaagtacagggagtgaatagtcaatcgccagttctgaactcttgcttacaagagttccagaaacattttctcctaaccttgggtttcttggtatcctcctatgtctttgaaataaaaacccaattcccttgagctagttttagtaacataccgctccctgtcatccagaatcctcattagaacattgtcccagaaaccataccacaaaaggctatggatctcttgccaaaagactaacaaatccaatctcctgcctgtaggaaatgcttttccaacattttgggaaaggaggcatcacctgttcctcaccccctacttcagccccagcatccccaggagaaaagaaacaagatcaagtttaagtttctctccaaccacagcatagatctgtttttctttttctttttcttgtatttttccagttgaaaatatgctattagaagacctagcagtgacccaaatattttccctttctgagattcccatattgtatttgatgcctaggattttttttttctcctagacctttagagatgacgcagaaatgcatttcagttctctgcagctgggcttaactttaaagtaaattagaatctaaactatccttgcataggaaagcaatacttctgaggtcagtaaattcaatgactgcttgtccagccatcctttagagaaaccaagtttcaagcaagcccaagacagtaaggatctatgagctattttctgactgtgaagaaaatgtttctgagaaggcaaagacagacacacacaaggtattcagctctaagggcctcactgtggttgaatgaaagcagactccatgcatcatgcagcagagacagccgcaggtcagtcgtgcagaagatggaaaatcgagagagagagagcagtgaggcttgcatcatacccagacaaagttccactgagttgcttaattaccctttgctctttataatgatagttat

SEQ ID NO: 439 - DNA, 8060 bp, Homo sapiens
ctgagttgttttcccagcagccactgcacggctcgaaggatttgtcgttgagggtggagaaggtggaaggatgttgaacagacttttccctaatgagctgtgatgccagctgcaaaggcggcaaatcctgttactcccttcagctactctctgaagctgcagaggggcagtggtaactggtctccctgccctatgctgattagctgccttttctgctgtttttccccccttcctcttctgtcccagagcatcttggcaaagttcagatttctgtgctcacagctcaatgctcacagtgaaaaggaaatacaaaagaggaggagagaaagtgagaagaaaagagagaaaaggttggggtggaggtttttagtagagtcccttattgccttagtctaagacttaagctctgggttgaaaccttaagtggtaaagctttgtaagtagtaacctggatttccaaatagttcttgcagatagttttattggcacatgaacacagcaggccatatattaaaagcatttgaatttctatcgtttagaaacctccgaattttgaaaaggacacttcgcagtttttccacaaactatcattgtgaggaagatgaaataattgtaagataaatgttttcatgtggcatttactgtgtgccactgcttcatttaatcattacaacccttgaaaatagacacttttaatgtgaaaaataatttattgtagtaaacacattttaaagtggtcagttcagtaatattaagtagattcacattgttgtcaaagagatatccaaaactgtttcgtcttccaaatgccagccgcatatctgaaacaccatacccattaaaataatggggaaacattttaactgatcagccagcattttaactgtttggccatttcttttgttctgcaggattaaaaatagctctcctgtttctttccttggctgttttgatagaacattcttcctctgtatttcatcacaggatggtgagaccagggcttgtatttactgtgccttggtttatccatttggtactaactggggggggtttatagttactaaagggaaagagaaaaggctttactctccaggggttcgtcacctattcttggttctcatctttactgattctgcattttaagttctgctgagctccaggggtaagttcagcaatgtcttcatcacctcacaagttagcttggacctgcaaatttttgggtgggttttctgggtggcttctgacacagtaaacataatatcatagaattatatttaaaaagcaattttacatgttgaaccctgtttttaatgacttcatgagttagttactatattccagggatggtgaaatggggaatatggtaggtaagggagaagagttggaatatttaataagtgacgcagagttcctctccctatgtgtgtcctttgagggaccatttaagcctattcgattctccttggaagagctagtccagcatccctgatattctactttctattgtgttagaagaaaaggcactcctgacattattgctacaatgtagaaaacttgtcttgcctccttggaggatagtattctagctagaacctaggcagcgctggtgaaaatggccatgataaaggcggaagccagaagaggatgtctgtgtgccgaaggcggagatggagaaaaaggtaattaaatttcttggaaaccacatagtaaaagtgatcctctaaggagatgccacatgaaccatacggcaaactttatgcagtcacctccttgaaaacaccctcccagttcttagcttatcttctcaaatgtggcctttgttatttatttatttctgtagagatggggtctcgctatgttcctcaggctggtcttgaactcctggctttaagcaatcctcccatctcagcctccagtgttgcctttattatttaatttggtacttccatgcttaaaaaaatcttaggagaaattagttagtacagactgtagcacctttaatcacgatccgattgtgctcttagtttatgatggcagggaagggaacagaacaggacgtgtagaaacctggggatgcatggacgccacagtgacagtgagcactggtgggagcagcgtgggggagcttggctgggaagactttgcagataaagtttctcccgtaaagaactgcagtacagttcagcagagggacgggatttccacctagggagaatggtacatgtgagggctcttagagaaaagacacagtggttggggcggtcactgtaattgtagaaaccatcaggcctttctagaatggagaacattggccggggggagcagcttggttttgggaagaacactgtactcggtgacctgggtttccactcagctctgtcactgatttgcttagtgcccttggagaagccagttaacctttctggacctagtttatcttgctgttgttgttttttctcccttaaaagagacagggtcttgctgtgtggcccaggctggtctcaaactcctgggctcagtgatcctcctacctcagcctcccaagtgtctgggactgtaggcatgcaccaccacacccggctagtttctacatctttaaattgagagaatggaaatacgtgatctgtagtttcatttccggctctagctgattctgacttacctatcaaatgagattggcctgggagttttggctttgaagattttgcttctgttgtaagtcactgggaggcttgcccagtgcccagcttaaaacatgagccattcaagtcttccctcgcctcggctggcctttacttgtggcagatcttgaattcctatttctccgttctctcatttagtaagtcctttagaaccttcctcttgtgctgttgcttgggctaacatctcccctcccaccctctaccactagaattccttgtatatacacagcagctagattagtctcactttgcctctctatagaaataaactgaggtagatctccattgtctcccgaagaaaggccaaactcattagctgggtattcaggatcgcctgtcaatctcagctcacattactccccttcacataatctaaagaatagttaaactgaacctaatatcctcctgcacctggtcatgccctgcctctctccattgtcactcggtcacaattaccatctcacgaaatctcccaggcttccacagcagaagtaacccttttcttctcagctcccatagcgtgttttctgtacctgctagtactgattgatttgtgttttttgtttgtttgagacagtgtctcactctgtcgcccaggctggagtacgctggcacgatctcatttcactgcaatctctgcctcctggtttcaagcgattcttgtgtctcagccttagtagctgggatcacaggtgcgtgccaccatgcctggctaatttttgtatttgtagtagagacagggtatgaccatgttggctagactggtctcaatctcttgacctcaagtgagccaccatgcctggccagagccgtattatttctatataagaaggaaaccccaccccgttttgtgtctgctatcatgtaattgctgttaagatcacaacttgcatcttatgcacatctcgtacttttcagaaccgttaataagattgtcagaagtttggtttttctggggattactgatctggttatgagcaagtcaaaccatagggagcagactcttgggaaatggtttgcatgcagaagattgcatcctggttgaaagaatgtgggcaaacttttctagtaggagacttgatggcctagaaaacattctgtcatctaagaaaatacctgcttattttgggggtgttgggaagggaaataggatctcctaaagttccccaccaccactttttgtccagtggtccctttccaaacaattgcttgttggaataccgtgtcgaggcaagctgaaccccaaggaaagcaaagacattcacagagacgttacctcattctgtttagatgatgtaagattagccttggatctcgcaatcacctttcatcagccatgtaggtgtggcatcccaaaataaaaattgtcattatcacttactaacaaatgccattcaaaatacagtggttctttaaagctgttgcagatggtttatctcttgagaaggttgagtaaatgacaaatgtttcataaacaattacatgagcactcctttcctctcttttgcgattaaaatagcagtacagcacatttgtatttatactcgattatatataatcaaagagttaagctctttaattatgcagctagcattgatttatcaaaaagagttatgtgtgtttcttctcatgtgccggtaagaggaatggggttggggagggagtagtgagagaaataaaaccctgggaaaaagaaaacgcggaatccggttgctcttctcacagtagccagaaggaagggcagagctgatctctggcaagtccttccgctgctgggaccattcagttcttggggcttgtgctggcggtaggaaggggtgtgtattttaagaaatctctgtttgatttctcaacttccctctctccctccctcaggagttagaagccgctcttcacagagatgacgtggagtttatcagtgacctgattgcctgcctgcttcagggctgctatcaacgaagagatatcacgtgagtaattctgatctttctaagcatttcttgccccaagaactaattaaccaaccatagtgatgtttcctgtctcctgtgacaaaccagaaccgatcattaggcatcacgggacactgtagatggaggacgtacacgtaaatttccaggctgtgtttggcttattctgcagttgggtttttattccatcataatctttgagtttatttcattctcacaaatccatatcacttactcttggataccccagctaacatattttagtgtagaatttcttcttatatttgccattttctgattttgcagtattggtaaagtattgcctaagaaatcaaaactagtttttattacctttctgtcatttgagtatcttctgttgtttacatagccagcagcactgatgtaataaaaaaaaaagagagatgtgtagagacattgagcaaaatgtgatgtatggagacaaataaaggagagtcctgataggacctcttgttttgatctttacttaatacacgtttctttgctatgtgtctatataggacagaactacagggcaaactcacaaaaaggtgagatgcaatgggtttcctggtctcttgccttctgatgccatgtagggggtttgagttgttatggtttgcctttctcagataggtaaaatggtatcaaattttttttttttttttttttttgagacggagtctcactctgtcgcccaggctggagtgcagtggcgcaatcccggctcactgcaagcttcacctcccaggttcacgccattctcctgcctcagcctctcgagtagctgggactacaggcactcgccaccacgcccggctaattttttgtatttttagtggaaatggggtttcaccgtgttagccaggatcgtctcgatctcccgacctcgtgatctgcccgcctcgacctcacaaagtgctgggattacaggcgtgagccaccgcgcctggccaagtatcagatatttttgttctaacgaattcagtctgttagggctgggaaacgatgcttgttgttaatgtgcaataaagttgtagacaaggtaagaaggagatgtaaatgctgtttttctcagggtggaagtctgcattctctaggggagagttattgctcgtgcactaagtataatgacttttccccctagaatacccaggttgtatttgtaaataaaaataaacataaaatataccttagaatattttcttccgttctctatttaggatgtagacttgggagtttgtaatttttaagcactgttgtattcgtaccttgtgtttaattccacattttcataacctggaattttttttcattatagcaatcagtttcttataaccacattttctaaatgtcattgtcaaataatccagtctggtagctgacaagttatgtctagcttttagctgttataaacatatataatgcatagctttgtacaaaattcaccaggttcctggaagtacatcactcagtcaaaagatatgcccatttaagatcttcattttaagcaaggcttaaaggcttttgccaggtttcccgtcacagaggtggttgtattttagccttaaatgatcagtgcgtgagagtgtctgcttggatgatccttgtgagccctctgtacacagactagtaggtactggcagcacaaacactcaccagatctcttagagttcacagttgtgacagggaggtccatgaatcattacagtaatgattatatagttgccagttatgtaattacaacagtaagtgcttagaaataaaaatacaacatattaacagagcatacaacctggggtaagaaagtgacttgtgaactgagccttcacatatgggctgttttctctcataggatattcctccgtggctgagttcatcctctaatttgtccttctgtttaaaattgatcttaactaattctgcttgtttgttcttccagatagtggttacaaagttatgtcctgttctttaagaactccccttatctaatcattctaactagaatcaaataaacctatgaagaaatgtgggcaaaattgacatccctacaatgtggtctttcttttttttttttttttttttgggacagggtcttgctgtttcacccaggctggagtgcagtggcaggatcctgtctcactgtagcctcaacctgggctctagcagtcttcccacctcagcctcctgagtagctcaggacaggactgtgccaccatccccagctgatttttaacaattttttgtagagacaaggtctgtgttccctggctggtcttgaactcctggtctcaagcgatcctgctgccttggcctctcaaagtgctgggattacaggtgtgagccactgtgccttgcccctacaagtatttattaaataatagaataccgtatccctgtatctgtctttaatttgcagagtttattggccttgatttttttcttgagttagtattcttttgactctctaggattattatctatctcttttttcagtgttaatactgatgtctgcttcaagctgtattatccattgttaagtaacaaattaccctaaaacttagcaacttaaaaccacaaaaagtgtaatcttacagtttctgtgggtcaggaacctggacaaaccactactggtgtgtttagctcgagttagcttacaggtctgtgatcaaggtaccagtgacagcagtcatcttgaaacttactactcatgtataatacacacacacacacacacacacacacacacacacacagagaaaagtgctcatttcctaattctaaagctcaatgaattttcacaaactgaacacacctgtgtaacagagaacctggacaagaaagaacactacaatctactttacttttttccctgaagggaattgcctaaaatgatggttccacatgcggttactgtgaatgtacactcgttcttgtctgaagttctactttgatctcattctaaagaaagagaaatttggataagtaaatgtttacctgttatgcctccaagactaaactgttctatgcagcttaaaaagttacttaatttcggccgggcgcagtggctcatgcctataatctcagcactttgggaggccgagacgggcagatcacttgaggtcgggagttcaagagcagtctggccaatgtgatgaaacccggtctctactaaaaatacaaaaattagccaggcgtggtggtgcacgcctgtagtcccagctactcaggaggctgagatgggagaattgcttcaacccgggaggcggaggttgcagtgagccaagatcgcaccattgcactccagcgtgggcgaaagagtgagactccatctcttttttttttaaaaaaaaaaaaggccgggcacggt

SEQ ID NO: 440 - DNA, 8060 bp, Homo sapiens
aaaagcaatctataaattcaatgcaatctccaccagaacactaccataattcttcacagagttagaaaaatcaatcctaaaattcatatggaatcaaaaaagatcccacatagccaaagcaagactaagcaaaaataacaaatctggaggcatcacactacctgatttcaaactatactataagaacagtcaccaaaacagcgtgatactggtataaaaataggcacatagaccaatggaacagaatagagaacccagaaataaacccaaatacttacagccaactgatcttcgacaaagcaaacaaaaacaaagtggggaaaggacacacttttcaacaaatggtgctgggataattggctagccacatgtagaggaaagaaactggatcctcatatctcaccttacacaaaaatcaacttaagatggattaagaacttgaacctaagaccaaaactataaaaattctagaagataacattggaaaatcccttctagacattggcttaagcaaggatttcatgaccaagaacccaaaagcaaatgtaataaaaacaaagataaatagctgggacctaattaaactaaagagcttttgcatggcaaaaggaacagtcagcagagtatacacaaaacccacagagtgggagaaaatcttcacaatctatacatctgacaaaggactaatatccagaatctacaatgaactcaaatcagtaagaaaaaaacaatcccattaaaaagtcggctaaggacatgaattgataattcttaaaagatatacaaatggccaataaacatatgaaaaaatgctcaacatcactaatgctcagggaaatgcaaatcaaaaccacaatgcaataccatcttactccttcaagaatggccataataaaaaaataaaaaaacagtagatgttgacatggatgcagtgaacagggaacatttctacactgctggtgggaatgtaaactagtacagccactacggaaaacagtgtggagatttcttaaagaactaaaagtagaattaccatttgatccagccatcccactactgggtatctacccagaggaaaagaagtcattattcaaaaatgatacttgcacacacatgtttatagcagcacagttcacaattgcaaattcgtggaaccaacccaaatgcccatcaatcaacaagtggataaagaaactgtgttatatttgatggaatactatgcagccataagaaggaattaattaatagcatttgcagtgacctggatgagattggagactattattccaaatgatgtaactcagaaatggaaaaccaaacatcatgttttcactgatatgaggacacaaaggcataagaatgatacagtggactttggggacttgtgcagaagagtgggagggaggcgaggaataaaagactacaaatatggtgcagtggtatactgcttgggtgatgggtgtaccaaaaatctcacaaatcaccactaaagaacttactatgtaaccaaatactacctgtgaccccaataacttatggaaaaaatttcaaaaaatttcagttgccaataaataaacacttaaaaaaattgaaatcaatgaaaatggagacacaaaataaccaacctgcagggatacctcccaaacacttttgattgaatgtgcctatcatcctggtggccaagaagaaatccctgcacactctgcctagtgctgagctgcataaatcaggaatccaggcacacagagtcatggctcagaaagggccaaagactgcctgcgtgaggttttccagatgctgatgtgttatgcagctgaactgccacagttcctacatctcccatgagcctagaaaatggcagactcgagctcttgcaaggaccccactagacagcctggtgtctgccttcacagtcagcgaccacgacctggcagctctggctctagcattgtgttccgtgtgtgtgtgtgtgtgtgtgtgtgcgcgcgcgcggtgtgtgtgtgtctgtctgcctgtctctggctctagaattgtgttccgtctgtgtgtctggctctagcactgtgtttctactgtgtgtgtgtgtgtgtgtctggctctagcattgtgtttctactgtgtttgtgtgtgtgtggctctagcacggtgattctactgtgtgtgtgtgtgtgtgtgcgcgcgcgcgcacacacacacacacacatgcctcactgaatgccaagggtcccctgagcatcctttcctgtagagccaggtctcagaatgtgtaacagtgcctgttcaattccccttaccccaacagaaatagactttaagagtccacagaaaaagacatacaaggatcttaaaatatacaaaaatatcttttagcgactcataagaagggaaatcaaaacaaaaactacactgttgtataatttttcacatattatcaatttccaaccatgacctgtccccctctgaggaacctgtactacctactatttcctgacccatcttggttctggctcctctcaagtgttctcaagtaatcacactattttcttgctagaatttgtcctacacatgcagatagccaaatgccatctcacaaggaatgtaaaaccacatgttctggtgcaattgctttgttttctttaccgttaaaatggttataatcccacttaaaacacagtgcaattcactatgcgaaatgacctctcatgcaatcaaatctccatagaactttggtcagtttttctaattttggaaataaggccaaacttttgccttagtatcaataacaagaaacacaaagcacaacaagagcgaacacacaaacactcttaacatcttcatctagaaataaccagtataactgtgacaattgtgtcttctttccttttggactttttttgtctacatataatttgttgagcttatattttgtattattaccactatcttttgtaatttttgatacttatttaagaagcttcattctttctttttcttaataatcatggccgtttcagatcctcccatttcacagaactgaaaaaagatgaaaatgtgagcgagcccctgaaaatctgggggggggggtctctttccatgtctttaaatgcgtacgtagaaagggagctgtattgcttttaggccaaaatttcatccgaggaaatgtaccctctttaggggtacattcaagggagcccagcacttgtgagcacgcacggcggccatgaggtttaaccaccactcagtccaaacccacagagcacgcgcaccctcctccagccacgtaggtggggagaactcgagtgggtgaaggaatccgtgtgcgcacccttctcctcctgttcgccccgccctttggccacacagaaacgcttccaggccaaccgacgaggaaggctagagggactctgctaggaggctctccctacacttgccagaactgaaaacgtaggcaggggttaaaaactcagtgctccaaaaacgcaagaccccgacccgcccacatggccccgactcggccctcggggactcccagataactgcctgacgcccgagccggtggtgcggcagccaccattgcgcaagttcgagcgcccggctctggctgctcacatgatggaggatggggaaggtcctctgcaccagaaaggccgcctatggcacagaacccctgccctacttcccccagcgtcagggaaaggaaaggcaaagaaaggaaagacgaaggaaggagacctacctagctgaggctgcgcgccagcgggaaaggtccgactacctctgatctgcgttctggggacggctggaccccaatgcgccccctgcggcaacgcgactcccgcgttgccacagggtaggctgccatccctccctccatcttctgtgtctcctgttccccagagggggtggaagctgaaggtcagaggaaggggaggtgttgggaatccgggttgtgtggtgtcggctccgcccaggggaggagtgggacatcttaagccagtcgtaggtgcttaaagggccgggagaggtgggctacggaaagtcaggtgggaaatctttcatcttggccagttgctcggtagaatctatttctttcccttagaataaggtacttgttgctagggggcaaacgatgattgagtcagaacaatacaatggaatatctatagttcaatattcgcaaaacatttagacgtaaaagaaatttaaatatgcatattttcaaccgataagtttgtatcattacattgactgaggttactaaaagcctcaattgctccctccccaggtgagaggtaatgagtaagagaaaaggtctgggagtatctggccagcaggtagtcttggggtaggggcatggggctgagagtgtggggtcagttggtggggagtgaaatgtgtggttcccaagaccagacactgccggtgccctatcactccctgatttttgtctggaactgttaggggcccagtgctgcttctgcggccattccaggggatgctgctgtttggcgcacacgctgcctaggtgggtgatgaaatgctacgtccgaaagagtgacagcgactcgaaggtttcccctgtctgaccagtgccctgatatcttctttcttttgaaaaaaaaaaaaaaaggaacacttttgtcttgcaaaataatattcgcagaatgaagacacctgtagtgcataaagaaaaacgaagataacccgtgatgacaccactcagaggactgttaaattggggcgtacatccttctagcacctgatttcttaagttggagggagagatgcaaataaagatccttttaaaataatagtctggtgagctcccaagacccatgggaagcatgcacgctattcagttgccaacctattgattgcgaagatatttttgtggacccatttaattttctattcataatatagtatttgatggacttttactattattttttgtttcacaaacccaatgttttaggacctgatggacttttacaaaaatttttctgaagaaaaattttaaggaatgttttccctacaaataagtgtttcaagtgagaaccaaagtcaccgctgcccaggtccactccccagtacacccaccttaaaagaaacactttaaaaagaaatccaaggcctctacaccaacctgaggagggtacaactgcacttttaccgcctccaactccttagaattttctgcctccatttcactccccaccaactgaccttcactctctcagtcccccatccccaccccaccccaagaccacctgctggccagatactcccaaacctcttctcttactcattcccttgctgtttgggcagaggtgggtgggaattaccaggaggtaggggaaagagaataaatgggcataggtaatactttgttctggtcagacagatgccttcaccggcttaggggagagttgagggaggggttaagactctgccacaattccacgttgtagaaaatggaaagtggaaagagcttccctctggttcccaggtggaattagccgagaaagaattgggctatgaatctcagctgcacctctctggatgcctccctgtttttctcctcctttatttaatgtaggaatggccattgcctgacacagaatcaagtcacagccttttttctgtctgcattacctgaaccgacacagattcaataaacactcattgtgccaggaaaccaaggtccacagaggctaaagctttgccaaggtgaaccggagtgtcacaggatgaatccaaacatgctaggctgcaactcctttgcgctcttcatgcaaatgggcaagcagctccataaaggatgctcaacatcattcatttaggcaaatacaaagcaaaatcacgaggagatacacttcacacttactaggatgggtagaataaaaacaaaattgaaaataacaagtgtgatgaagatgtagagaaattgaaactgtcatacattgccggtgggaaagtaaaacgatgtagatattatggaaaggagtttggcacttccacaaaaagttaaacgtataattaccacgtggtccaggaattccactcctaagtatatatccaagataactgaaaagatatttgaacaaaagttatgcatgaatatttgtggcagcataattcataaaacccaaaggagaaacaacctaaatgcccatgaactggtgagtgtttaaacaaatatgctatatccataccatggcttattatttagccataacatggaatgaagcacagatacatgataccacatggatttaacctggaaactattataatacattaagaaaccagacaaaaatgcatattgcatgattccatttatataaaatggccagaataggcaaatctatacagagacatagtggattagtagttgccaggggctggggaaggctgaataagaaatgactgctaatagaaatggagctttcattttagaaaaattttctaaaatttgttgtaatggatacacaattttgtgaatgtactaaaaagcaatgacttgtatacttttaaatggtgaattacatggtatgtgaattgtatgtcaataataaaatgtaaaccagcacttagatttaataaaatttaggtacaagatttgtgggaaattttatatcatgggtgaatcaaggtgagaatgctgtaactcactgatatgatattttccatcaaatatatgagaaacatattatgtgaatgctgatatcatgcaatcagagtacaaagcatcaactatgaatgttcctgccaaaaaaattgtacctgaatctaaccacatccatagatattactacaagatattctgcttataaaggaataggttttgcattaggatggatacggtaaaatgtaaaaaatgaataattctacaggacaaataataaaccagtctctcaccaaaggaatagcaaagaaaagagggagggtggtggtgttatagatttaagaagaaataggagactgggcatagtggctcatgcctgtaatcccagcactttgggaggccaaggtgtgcagatcacctgaggtcaggagttcgagatcagcctggccaacatggcaaatccccatgtctactaaaaatacaaaaattagccagatgtggtggtgggtgtctgtaatcccagctactcgggaggctgaggcaggagaatcacttgaacccaggaggcagaggttgcagtgagcagagatgctgagatcatgccattgcattccaggctgggcaacaagagcaaaactctgtctcaaaaaataaagaaagaaagaaaaagaaagagagagagagaggaaaggaaaggaaaggaaaagaggaaatatttgaatcaatgttgtgtaggaggaggcagagcaagatagcagaatagaaggttccacctattgtccccaccccttgcaaggacaccaatttaacaactatctatacaagaaaaacactgtcgtaagaaccaaaaattaggtgagtactcataggacctggttttaactttatatcactgaaagaggccctgaagaggcaggaaaaaaaacagtcttgaattgtcacatcacccctcccccaacccctggcagtaagtgtttctgtgtgctggtggagggagagtgcagcaattgtgagtcattgaactcagtgctgtcctgttagaaaggaaaaacagaccaaacacagctgatgctccccaccaccccaacagagggagtatttatattagcccttgccagaggggaatctccaatgcaggctaaaatgccctggggcccttgaaaggcagtttaggccaaaagtattgcaacttttattagtcctagtgctgaactcagacaagagacagtagtctagggggacacgtgacctactgacacagcagccagggaagttaagtgagtgctggcctcatccctctactaaccccaggctgcacagctcatggctccaacagagaccccttccttacacttgaggagagggaagagtagggaggacattgtcttgcagcttggataacagctcagcaacagcaggatagggcaccagt

SEQ ID NO: 441 - DNA, 8060 bp, Homo sapiens
tgaagggccaactgaagggtttttcagtggcttgtcaaatgttctttatctagtatttgtttgttcgaatttctctaacaaagaggtttagttttgacttactgtttaagcacatgcaggttaagacaggagcactgaggcattactagttgtaaccaaagacatccaataggcttaattatttgctcatacacaaaaaagcaaattggataatgcctctgcttttggctcttatctaacttaatgtggacaactttgtagaggtcttgtcaacaaactgaatgagccactgaaagtgaggcattcattttagccgtaaactttggtgaacttttttctgttgctggatatgaatcagatcccaggaaacttagaaagaacatagaaatagcattattctgtccttagtgataaaatacccatttttcctcgggatcaaaagtttgggtcacccacaaatacacagtcaaataattgtcagcaataacatcaaaagaattcaagggggggccgggcgcggtggctcacgcctgtaatcccagcactctgggaagccaaggtccacggatcacctgaggtcgggagttcgagaccagcctggccaacatggagaaccccgtcgctactaaaaatattaatactaaatactaataccccatcgctactaaaaatactaataaaaattgccggatgtggcggctggtgcctgtaatcccagctactcaggaggctgaggcaggagaattgcttgaacctaggaggcggaggttgcggtgagctgagatcacgccattgcactccagtctgggcaacaagagcgagactccatctcaaaacaaaacaaaacaaacaacaacaacaaacaattcaagggggaaatgaaagtctaaaacaattggatatccccatgagtaaaaccaaccttaatccttacctcatagtatacacaaaaattaatttgaaatgggtcataaggctaaatgaaaaagcttaaactatgaaagttataaaggaaagtataggagaatatctccagaactcaggagtagtcaaaagtttcctagttcatagcaagcaataatcatgaaaaacaaattgataaattgaactttgtcaaaattaaaaactgctcatggaaagacgttattataaaaactaatcagcaagccacagattggaagaaaatattcacaacacacaaacatctgacaaagagactatccaaagtatataaaagaactcctaaaattcagtaatcaaaagataaccaaattcaaaaatgggcaagagacttgaacaggaagatgtacaagctactaagaagcacatgaagtagcacatgccatcatttttcatcaggaaaattcagatgaaaggtccattgagaactgactatccacccactagaatggctacaagttttaagagaaactgacaccactaaatattggtgaggcgctagaacaaccagaactctcatatactgctgctggaaatgcaggacaatttacctgcttcagaagactatagaagagcttcttctaaagtaaaacacacatcttttctatgatccagtaatcctactcctatttgtttatccaagagaaaggaaagcatgtgttcacaaaagaactcagacaagaattctcataaacattttattcatgcctaaaaactggaaacaacccaaatgtccaccaatacaacagataaacttttgtatattcatagagcggaatactactcactaatataaagaaatgaactatatgcaacattggtgaatgtctaaaatactgtgcagagtgaaagaagctacacacaagagagtatatacagtatgatttcacttgtatgaaattataaaacaagcaaaatgaatctatggtgtaaggaggccatgtaaagagaaagagaaggccagccagcccagtatcccagctgagcctaacctagattgcagaataatgagaaataataaaatgattgttgttttaagccactaggttttggagtgatctgttacacagcaatcaataatcagcatcattgctttcctcatggaattgtcagaagtatgtgatatgacacatatggaagggctctgtaagtggacaagtgctaagcacttgtgagcggcagttatctctgggcatatgtgcagattggggttagtgctcattagggatatgtccatttgagaattaacctgtggaattcagagggtcttactacccaaccaatataacctttggtttcttctatccctctccttcctcttgagcagccatccacaactgcttctggggaagagagagagagaaagagaaagaaagatgttcatggtttgttaaaaaaataaaagaaaataacatttacaaatggccagagtagaaaagatgtaccaatttcatttatcttgttaaggaatggggctagattgaagattagccaatgcttataatttttgaggctctaagaaatacctttgaagttagagaaggatggagagaagtgagagggagtcaccatggtctaaggggctggtcctcaatctggtccgtgacatgttgatcaggctcagggaaattaaattaaatgaaccaaattcccaagaaactgcttgatcaaccagaacgccagtttatccacttgcaatgagaaatgcaatttccaagccacagtatttggttctgtcaggtggtaaggagaagattaccctgggaaaccagattacttgacctggtaagagtttcatgtctggaaacatggggaagtgaggacatgcggagaatcatgagcaggtggagcactttgggcgtgctgagtaatgtcagtggactgttacacaaagcttaggtaacgcatctttcatgcacctggaatctgcaatctaacagatttctaaccaggctgagaggatgctctcagtcctgccagtttatggacttacagggatgtaaggaactcaagacagggaaatagcctctgtctccaaaaggatagcggagatgaggtcccttttttattttttaaaaaaacaatataatataattgatggattcagaccgttcacgagagactattacctccacgcccagctcaggcaccttctctagaatccctttcctaataatgtaagtgcccctgtcacctccatctatccatttttgttcttttaagcctattttatattatttgcttatatgccaaaccctaaacgatgagttcttgaaggttaaaattatgttttattcatcttttttcactagcccccgcatagtcgctggcatacataccgtggtgctcaataaatgcatgtggcattaactaaaagtttgctgtttctggaattcgtctgaaacctgaaacactgcaacaacatctcacttagaatgttgccttacccttttgccataattttagagtgaggaagtagaggtcactagattacgtgtccttttatgaagaacctacagctcagggcagaaaggcacttgccggaatcaccctgccagggaactctgaaccccgctgcgccgccgctcctgatctctggggtttcaggcgcctcctctcttacaaccctctcctggggaagtaaaccccatcaagacaccaccacatccttccccagcgactcagcctggggtcacaaaggcctttacgtcccactgaaaaacggttttctttcatttgtgcccattcgttcttgcagccccttccccagatcgaagactagggtcttagtaaggagaggtaaggagggaggggaagaacctgcctggccccccgcggagctctgcagggggcgtcgcggctgcacgccagcgcccgcaccaccccaggcgggaagggagttatcacacagggggtcgcacgcagatctcggggaccgtgggtgccacgaggtcaaactggcagagggagacgctgcagctgctgtaacagcaaggaaagccgaagcccccttaggggatactttacaaaattattttaatcaccgtgcaaacctaataacttgacccaagcgcaatcacctgtattcacccagagtaaatattcctaaaatcccgttcagtgtgtctgtgtctctcccgcctctttccgtttcaggcaaatgtctaccccccctctccccccaccgttaacacctctctgcagcgtgggaaacagtgcccagcagctcagtcctccgcttcccgctctgctttttgcatcccattcggacttataggaagtagttattttttggtggtggtggaaactgggcaagaaagaagacgctaagcttggccggggccaggagaaatattgagaagggtcgttaccttccatccgatctaaaccaatcatctcaaacttggctactctttggaaccacctggggagctttaaaaattatggacgccctgatagcaccgcagaggttctgatctaattgatctgggatgcggcctgggtatcgcgatttttttaaaactcctcaggttattcccagcttgaaaactatggatataaatttctcattcctcttcccacccagaccaaaaaaaaaaaaaaaaatctaagcctaagttgatggcccagggaatctggcacctgctcccctgcaaccagccagtgctgcaaggtccccgaaaatcggcgcgagcggcgacgctaaacacgcggcggcggggcgagcgggccaggcgggcggtgccgcgcgtggccccgcccccgcacgcctatgggcgcgaggtgcgggccctgacgtcactcttgtcagggccgcggcacatgggcggccggatgcgctgagcccggcgctgcggggccgcggagcgctggggagcagcggccgccggcgcggggaggggggtggggtgggacggcgcaccgcctccggtgctggcactaggggctggggtcggcgcggtgtcttctgcccttctgcagccgtcgacatttttttttctttctttttttcaattttgaacattttgcaaaacgaggggttcgaggcaggtgagagcatcctgcacgtcgccggggagcccgcgggcacttggcgcgctctcctgggaccgtctgcactggaaacccgaaagtttttttttaatatatatttttatgcagatgtatttataaagatataagtaatttttttcttcccttttctccaccgccttgagagcgagtacttttggcaaaggacggaggaaaagctcagcaacattttagggggcggttgtttctttcttatttctttttttaaggggaaaaaatttgagtgcatcgcgatggagaaaatgtcccgaccgctccccctgaatcccacctttatcccgcctccctacggcgtgctcaggtccctgctggagaacccgctgaagctcccccttcaccacgaagacggtgagcgctgccgcggccccgctccgggaagggacgacgctccgggggtccccctccgcggccgggcacgcccgctggagcatcccccaaccccgctcccgccctgtcccgcggcgccccggccccgcgctgatgaaattgaggagctcacccagcacccttcctccccttcctcctcctccatgaaaggggagggacccctcctgagctacatttaaaagagcttcgggcacccggcctccctgggtcccgctcctgcggcgcgggtgggaggtgtaacttgacaggtcaggatcgttccctagaacgaggcacacccgcacgcagagcgagcccgcctgcggagggcagagcctcccgggctggggaggagaaaccctggggcctggttctgtgcggggcagggggcgggggtcggcttgagggagggggtttcactgcgtagcctgggttttggggttgtgttacagcttctgttactggttagtatttggaactcacgaggtgtgagagaagactcgttttcttctggtgaagggtagctgagaaagcggggtgggggctggggccggtggggggagtggtctctcggcgggaagccgtgcacgcctccagcgttgacactttcccggtgcactttttctggtgggaggggagagcggagcaggctcacgtgtaaccgcgcaggagcctcctctggcttgagccctttcttggtaagtcccaaaccttcccaagacaaccttggccttagcagtagaggaggggtacgtgtgatgaggccccaaacccggctaagtgatgccacggatttgggttgatgcgatttcatgccttcggtatcacagtagcaaatgcgaaccgtgcggctcacagtgtaaagttctgaaaggttatttggctacaaatagcttgggagtacttgcaccttcttttctaggagaggacaacctgttgcattgcaagagtttgcaatctgcagatgatagccagggacccctccctaactatcctttaaggaagagcatttgggaggaaggggctgcctgcaggcttttgcatctgtgggtgttttaagtcagattttcagatgagatggtagagggttagaatggatggcagtggaggctgtgtttctctgaagatgaaactcagaagcaaattccttaatcccagattccacccacgactgaatactagaattggcaagatccggaatgcttgttaaagacctaatgggcgagcagtacttccaggtagcaaatagctgcatacttccaacataaatgtatagaataactcaccttttccaatagctctgcttttgaaaggttttgtaaatgcatactctttgtaaattggatcatactcaaatgtttggagaagagaaggaagaaaacactttgtatttttttaaactccttttgtaaaaatcagtgtgccccagtggctttagaagcaaacacatgtgagctcagaaagttctcattctctgccaacatgaggcattggtcaagttccctcaagtctcagagcctccgagtctttgttgtaaatggaggtaattgttattttgcaagtttattgtgagatttttgagataatatatggaaagaaccaggtatccagtaggtactctaaacatgatgttaaagaagggtggaaggtccctgctttaccaaaattaagaccactaactcactggctttgtaagtctgaatgacctcctattgctgctgtgatgaattcctggaagataattcaagcctggttattggctgttgttttcttaaaaatgacagcagttgtatataatcacagatgttatattcctattttaggtttaagttattactcttctcaaataatgtgctgagactgttctctggtttttatcctagatcagcctgtagccctgccccaaggactagtgccttctttccaaagtaaataggaagatgttgaaaaacaggcagagatccacgtcctgcctgaacttttaactctagatctacaaaagacagcagccagagaaggaccctgccattcgtgagaaatagtcttataacaggccaggaaaagtgataaaagagcggtattgtttttcttttctttctttttttttaagtccagctttcccttcttctgcagcatttagtaaagataaagacaaggaaaagaagctggatgatgagagtaacagcccgacggtcccccagtcggcattcctggggcctaccttatgggacaaaacccttccctatgacggagatactttccagttggaatacatggacctggaggagtttttgtcagaaaatggcattccccccagcccatctcagcatgaccacagccctcaccctcctgggctgcagccagcttcctcggctgccccctcggtcatggacctcagcagccgggcctctgcaccccttcaccctggcatcccatctccgaactgtatgcagagccccatcagaccaggtaagtgccctgaagattctcccttcagaaagggaggaggagggtgaatgggacaggcaaggtagagttagcataaacatcttaacactcaggttttagcaaagatcctaagagaggtaccttcttctgctccactcctggcagaggctctcccactttaatgagcatccata

SEQ ID NO: 442 - DNA, 8060 bp, Homo sapiens
aatacttccttgatgcagctatggtcttctgtaatttcaaacagtcaccttttgatcccatgacctgcaaaattagtcataactgcctgagtaaatgaaaaggtattttaaatcaacacaggtaagaatcttgcctgaactgagagaaccccctaatcaatcaaattccagaaaacccaccttttcaaaataatatcaccaaaaagaataaaacatctaagatgttttttctaaggtgtttacaaaaaagcgaacattctcttatgcatttggtagtttcataaagttgaatttgtgtgacatctgcaatgcatgtgtttgactgtatacaattcttctctaatctttccacccttcttaggtaagggaattttattcaaattcttctttctttttttgtttcattttttaaagacagttttccaaagcttacaaatgttttccccattaccacttaattgaaatatgttagcaatgttttcaggctgacatcaaaatcttcccaaaaaattaaaatttagggctgccactccctactttagtactgtgttctgtgtgtgaattactccttcactccaatgcctaaatataaattcactcatttagctaagtgcttgtgctaggttttaaatattttaaataatttagtacagtgaaccttcttataaaactgagctattctgtgcattaatttgaatacttccgaggtgagactgagccccgaacatgactccatatagaagtaatcctttagggaaaactaacattctccctagaggataccagtgttagaagaaggttaatcttatttattgggatatatgtatgtatgtatgtgtatacatgtgcatatatgtgtacgtaaatgtgtatatgtacatatacatgtgcatacactatatggagagaaagacagatacagatatagaaggaagatgaaaacacatctttttttcctttaggaaatcatatttcctctgtttatgagcaatttccataatctgaagtttacacatcctattttctaccactaaagcccctactgttcaaaacttatttgtcaaccatggaaaagacaacagaaaacaccagcttgagaatgtccaggacaaaacctaaagcatgctttagaatggctgtcctgccaaattgctttttcaagatttactgacctgcactctgtcttcagtcaaattcaggcgtgctgcaagtctctctcttaggggagaaaattacaaatattcagtatttggagttgtggataaaatgcaataatatgaacgtggctcggctcagcactttgggaggccgaagaggttgctgaggtcaggagttggagacaagcctggccagcatggtgaaaccctgtctctactaaaaatacaaaaattagccgggcatggtggcacatgcctgtaatcccagctactcgggaggctgaggcaggaaaatcgtttgaacccgggaggtggaggctgcagcgagaagagatcgcgccaccgctctccagcctgggcgacagagtgagtctcaaaaaaaaaacatatatatatatatatatgaatgtacattatttctctcccccacctcccagtgcagttttctgtaatacggttgggactcgctttagggaggtttttcccattaacaacttcgctgttaaataagatagaaaaaggaaacatatgtaaaagcgcccgatggtttgttagctgaatatgactcaattcttctgtttgtgaaacagcagagaacaaccctggaaatctttccttgggaagtccgtccgtgaaaaaaaaaacaaaaaaaaattaaatgccaaaacacctttaaagcgctgtattgaaccacagtatttctgtttatcgtaaaaaggagaggtgaactctcagggagggaactccaaaccacatcggccaagcgcgccctagggaaattcttttttgctctttgccgggcgaaggctaagtacaacgaagccagaaaggtccccttaaccctactctgacctgtccaggtgccccccgccccccattccagcctggccagaaaaggcctgccccttcgtacactacgggtcggtatgaggagggctccgatgaggctagcgaaggaaaggggtcgctggctaccgaaagctcaaaagtccgccccctggttgtaaaagtgcgctccacgtggcagggcggttactagggcgaaaagagtgaggcgctcgccacgcgcgcacaatgtaaatggcgctaaaaaactcgataatcaagacaaataatattttaatgcaatattaaaacgtatcaaaattaatgcaaaaacaacccatggtgagcaaattgccaaaattttaaataaaggcgggatcccaccctgcctcactcgctttaccctagtcccgccccagtcttttacatcctccgcgccccgcccaccacgtcccccaaaaaccaagggcggaggcagcgcccgtgagccccctacgtggcttttagctccggtgaaagggtcccgggatgaactgggcgcctccggggcaagccacttaccgcgccacaacgtcgggatattgagattcatcgaaaaagttctctagctcctgcagctgaaactgcgtgaacgcggtgcggcggcggcgtttcctctctgggggctgtggtccctcagcggtttgtggcccctccgccggctgtggcccctccacggtcgtctggggcggctcctcctgctcttgcttcagctcgagcaggggcggctcctcctgctgttgctccggcttggtcaggggcggctcctcctgctgttgctccggctcgtggccgccgccaccctcacggtcttggtcgtccgaggggacggacccttccgtgccaacgttgttttccgcttctgttccgtactcaggtttggaccgtgtattctcctcgtcctctcctccccttgccatcagcgaggtcacggtaagtttctcatctgggaagggaggaaagcaaaagagacaccagggcgttggagcccacggcgcgtgggctggaggaggcaggggacccgctatggaagagcaactgcgacagccgcgcagcgtctcctccgcttgcctctcccagggaaaaattcctcttttggagttcgcgaaagctcccgtccctgtccaagcactaaccattcacttcctcgatgtcctcgccgactgccaggctgcggtagccaatatcactgtgggtgtacccgcgaagagactccatgcttcaagcgctgtcgataaagctgtgcacttctgcagactctgtgcgtggttccgcggcgatcccggggttggaactggctctgggaccaatggctcgggcgagcgcttttctggcgccgggacctctttctggcgccgtctggcacttgcgcgccctatatagcggtacggtgccttccgcaggttcaaagcgtatgcacacgcgtcggttaaacgccccctattagcattcacagtacatctagttgtgagtgcgacccccgggggacgcattcgtgtccagggcgtacgaaaaatagggcgagcgtgcgcaagcatggtgcaggtagtgaacatgctttgcggggaacagtggccccaaattgctgcttaactaactactcccaacttgagcagagacccagattggaaaaagcggctgggttgtgaaagccgatttgggggcgaggagacgagggggcgagggggcgagggggcgagggggcggggtgagacctcgcaccagcccgtggagaggtattttggcagtgttcctccgcccaaccgtctttaccccgcagcacttgggtggagcgatgccctttgcttcccccacggaaaagaccgagagatggcgttgaggaaagcgcggaaagttcagcagcccaaacatgcgaaagtgaacttgttagtctaccatgcaattgggttctgagcacgactctcccctgctagaaattagtgacaaatggataggactatctagttctgtacagttcgcgccaaagtcaggatagtgataaggtgcaatgattggctagaaggctgcttgctctggatttttgaattcagaacccaccgtgcattccgggagcgggaatttggggctgaatttgaagagcagtccgctgctcaggtgcacgctgcaagaaacccaacgtgctttttgagaaagctccaaggacttaagctttttagtaatgaacttatgtcagagtgcaagtatagaaatctgctaagtgcatagtgcatccaagaatgcttacactacgggggccccgtcttttgatgcgcggcacttgaaacgtctgctgtactaggttcctgcgcttcttattgcagcgcgctttgcagaagcccgttctgcaggctcctaaagcgcgcgtattccccgggtttgtgctgtggacctgggagagttcccgccttccccactaccccttcttcctcctccccctccctttttctagaactatcttcctgaattcttgctccatagtgatgtatcacattaaaagtcctgggctatgattgaaggctgtatggttctccctccaataagtgtttgcaggttctccaggacgtgttaatatccgtaatattataaaaataactctgtagacttagttactagggaggctgaggtgggaggatcgcttgagtccgggaggtcaaggctgcagtgagccatgatcaggatactgcactccagcctggacgacagtagaccctgtctcaaaaaataaaaaaattaaaaaaatttttaaaagcctgctaataattggccctatgcttgccactgtacacgatttatcttactttcgccttgataaccaccattatcatccccccccctttttttttttttgagacggagtctcgctctgtcgcccaggctggagtgcagtggcgcgatctcggctcactgcaagctctgcctcccgggttcacgccattctcctgcctcagcctcccgagtagctgggacgacaggcgtccgccaccgcgcccggctaattttttgtatttttagtagagacggggtttcaccgtggtctcgatctcctgacctcgtgatctgcccgccttggcctcccaaagtgctgggattacaggcgtgagccaccgcgcccggcctatcatcccccattttttaaaaaaaatacagaagactggggcccaaagagccaggcaacttgccaatggcaatacaagccagttttaactacaaaatgtgtgcatttttcactatattacggctgtcttaattcaaaggagtaaataatagtgggatttcaggtaagagtagaaggaggtggcatttgggggaggcatagtctttacaattcctgggtgtgaggggtctcctccttctcttgcacactaattcaggcctcttccccttgcttcagggcctcagctggatgtccttaaaccacagggttgggatccagcactgctgggttcccgcagcccaccacttcacgtttgctcaatacggagaggatattaacgggcaggatgctgcatgcactagttgctgagctggtgtctggaagacctgctcaggaggcagaggtcatgaggctcaccctcactctcaccctcatgtcagggccacattatgactttcgtgggccctaggcatttttgccttcctgggccccttcctccattaagaaaaaaaatatatattttacagctgtgttggtataaggatgaatataatttgggatggattatattaattttttcttatgatttgaaaagaaattaagaccttttcttttctttcttttcctgagatggagtctccgtctgtcgcccaggctggagtgcagtgatgccctcagggcttacggcagcttttatctcccacgctcaagtgatcctcccaaatagctggtactacaggctcgcgggacactgctctctgcaaatttttttgttgttgtttttagtagagacgaggtctctctatgtagttccagctggtctctaacgcctgggctcaagcggtcctgcctcctcagcctcccaaagtgctgggattacaggcgtgagccaccgtgcccagtcagttaagacattttcacaggcccctaaaagtgcggtgggcctagggcacttcgactacagtgcctaatgaataagtcctcctgcctcgtattcacttgcaaaaagatttcaagggttacaaccccacagcctttctgattttaagcaagacatttcctcctaaggctggctcctgctgagtctgcaggccttcttctctttgggctccatacccggcgaacaatttttccctgggatgttatatcacacaagaaatccatacagggtttaatcaaggtgtgaagtagcctacctagtatattggcaacagtatgggtgtgttctgtcacatcttagatttccacggtttaccaatgttttctaaacctcagtcgttcatgtgtccctttgcaagttttgccatatctgggtaccagagaggacggtatttacttaacacccttacttaaattgatttactttttgaaaaccttaaatacctaattaaatctcatcctaggcaaaaatagctacgaattcaagatttatgaatgccagatttatgtataccagatttatgtcaagcacagcaatagttgagaaatagggaccctgaagccagactgctggctttgcttgccacttgttaaataactaacttggtgagttgcataatctccttgtgccttggttttctcatctgtaaaatggaaataatgaaaaacacctacttcatggaattgttgtgaggattaattgaaatgataatagctaacacttagctaattcttactattcaatatatactgttaatatatacaaagggctgttcaaagtaagattaaatattaacacatttaaccctcataaccctatggaggtaaatactctaatccgcattttacagatgatgttactgagtcacagagaggttaatttacctaaaggcatgcagcttgtatgtattggaccttggatttgagcctagcttcttagaatgatgctttgtagagagaacatgctgtggaatggtaactattatgatttttaaaaattaagtgtgctattcagtgatttctagtatagtcacaatgctgtacaaccatcacaattatctaatttccgaacattttcaacaccttatgaaggaagcctgtaaaaccaatagcagtcattcctcattctctccctctctgtaggccctggtaaccagtaatgtactagttctatggattttcctattctggatatttcatgtaaatggaatcatacagtatgtgtccaattatgtctggcttctttcacttagcatagtgtttttgaggttcattcatattgtagcatgtgtcagcacttcactcctttttatggctgaataaaaatccattgtataagctgtaccacattttggttatagatccatcaactgatgggcatttgtgttgttttcaccttttggtgattgtgagtagtgctgctctgagcatttacatacaagttttgtttgaatatctgtttttcaatctttggggcatatacctaggagcagaagggccgaatcataccgaaattctatgttgaaatttctgaggaaataccacattgttttccacagcagctgtaccattttatgttcccaccagcagtacaggagatttacaatttcttcacatccttgccaacacttattttccaggttttgtttttattaaatccatcctagtaggtacgaagtggtgtctcattattgttttgatttgcattattctaatgactaatgatattgagctattgagctttttttttttttttttttgagacactcttgtcgtccaggctggagagcagtggcgcgatctcagctcactgcaacttccgcctcccgggttcaagcaattctcctgcctcagcctcccaagtagatgggactacaggcgtccaccatcacgcccagctcatttttgtatttttagtagagacgaggtttcaccatgttggccag

SEQ ID NO: 443 - DNA, 8060 bp, Homo sapiens
catggacttctgccctacatttcagttttatatataggacctaattataactcatttaaatgttaaatcttcaccccaaagtgatcatgggacatatcttacatacatgtaaacctaatacacatctgattgggtgtccttcatgaatattcatagctcctcctataacctgttgaatatgtatatttctccaacccaatcctcaaaaattcctgttttatccctccctgcttccctccaagtgcctgtctctcagcaaaccaaagctacccttcccagcctgtcagaatggccaccttgcaggctgcaactctttgagaaataaagctcctttgcaaatgtatgaaccttctcattcttcagttgacagaggccaagaagagtctagacaaacaggccttgctgggtttctccactcggtttattaacgtttcatcataccctttttatccaatcaaatttctacaaggttgtccatatgttgttgaacctaagcatagaattggacaatttttcctgtatctttgtgttttcatcctaaaggctcccttgaagacgttaataaatttgtgtaacttttctccaattaatctgccttttgcaagctaatcttacagcaaagcttcagagctcgccttggctcctatataataataaacactttaactttttattctttttagacttcaaagtaattgacctgatgttctcatccgagtttttcttggagcttatgtagcttccaggaatagcaaattattttccggactttcttcttttcatgaaatggcattgtgcttccacagtgatttctcttcccctttttttaaacaccagaattagcagttgtagaggctgtccctcaaaaatatatgatcgaggggaaaatattcatataacatttctttttttgttgttttgttttgttttttttttttcatttttgggtcatgctctgttgcccagactgggttgcagtctcacaattatgactcactgcagcctcaaattcctagcctcaagcaatcctcctaactcagcctcctgggtcactggcattatcggactgagccactgtgcccggctaaaagaatttcaaatactgtccacttactgatattttgctatggaaaaattcaaacatcaataattttgctagttgcccacctcttcttgcgtcattgagtaatggcttaacaagcccccttagctctctaacacaactgtatagacatatagatgtagatataaatatagatattgatttattgtaaataaagtccagatgctataactgggttcatagaaatatattgaatgtactcattgtttcaaggcctatgctgtcaagatatggtaaagaatcaagaaacagagaagagaaatgaagaatcctggaacagtgctatctacaaagaataatgcaagccacggccagatgcggtggctcatgcttgtaatcccagcactttgggaggccaaggcaggtggatcacctgaggtcaggagttcaagatcagcctggccaaaatggtgaaactccccccatctccactaaaaataccaaaactacctgggtgtggtggctggtgcctgtaatcccagctactcaggaggctgaggcaggaaaatcgctggaaccggagaggcagaggttgcagtaagctaagacggcagcactgcactgcagcctgggtgacagagcaagactctgcctcaaaaaaaaaataaaaataaaaaagaataatgcaagccacatatgtaattttgaattttccagtaagcacattttaaaaattaataagcaggtaaaagaattttaataattattgtatttaaaacaaaatacaaaataattatttcaaaatatagtcaatataaaaacattattaatgcaatatttcacattcttttttaaatcttaagtcttctaaatatgagggacatcctattcaatttgatattacatttttgttggaaataaatggaatttcattttgatttcataaatttcagtgctgaaaaataaaattcatatatctgattgtttaaaacatatctaacattttccaataactgaagtatcagcctttgaattaaaataatgaaaagtaaaataaaaattcaggccgggcacagtggctcacggctataatcccagcactttgggaggccgaggtggatggattacttaaggtcaggaaatcgagaccagcctagccaacatgatgaaaccccgtttctactaaaaatacctccaccccaccccccccaaaaaaataagccgggcatggtgacaagcacctgtaactacagctactctggagactgaggcaggagaatcgcttaaactcgggaggtggagctaacagtgagctgagatcaccccactgcactccatcctgagtgacagagcaagactccttctcaaaaaaaaaagaaagtcagtcctcagcagcaacaaccacatttcaaatgctcagtagccacaactggtttctgactgttttatcacataacacagatcctatgggaaattgtgttcaggtatggaaatagtgatggaaattactgattaatacaagtgagctgctaagttcttatgtaatcatgtaaattttgcactgacttctaaaataaagctttacacatatttagagatgaggattatgaaaggaactgaaggtaggttccaatggcaaaacaccggattgacagatttaagaacactggggaggaaatagaactatggggcataaagatggaatttccttaatggttctcactgactgtgacctaaagtttatcttttgattttggaaacattttttagatgtagatattaacattctaataatagaaatgaaaaaactaaaatgaaaatgagaaaacagaagataatatcaataaacaggtcttgggcctcagaagatgagatgtagggagtgtggagaggaaaagcacagggggtgcatagctctcattaacaaacggcccagcccacaaatacgtaatcatattatacaaaaggatttcagttcttcccttgcttcctatgaaacaattttgccaacatacctaaccgttttaccgtgatttaaagtgtacagaattttctttttctgaaaaggagagaagcaagggactcatatatatttcagatgtgagattgaaacgcacgacaatgtgtaatttcagtcaagacttgcccacgagtcctaagataattcaaatttgcaaaatagacactaacttgaaaggtgcaattgtatcaatcctgtggttagcagaattttgatgaatgccctaaaatagggcaggtttaacagaattcagggaatgagcaggaatgcacaaagcatcctttgtctcctctccactccagcttgcagacatccgcgggcatttgcgggcagtgataaatttggtttagccgtttcccctccctggaggacgggggctccagcatattcatgatgtcaatcgccttggactacatgccagcgtcattgcgaacctgctacactttacaaaatagctttccaatgagaaagaaaacctactgggaaagaaaaacaaaaagaaactagaccttgcaacgggcacgcacgcgcactatccctctctgaaatatttatagtacgcttacacaaacgcgaacttgtaaatcaaaactctgcctgaaccaaagtagccaatagattaaaagtatgtaaattaggaattcccaaactgctctttttattggctaggaaaagaacaccttacagggaatccgataggttaattcacaatagtgttaggctgtaatgtcattctttaagaatcttttccagtaaacatttgttactttttcaaagtaattgggagctgttgagtgtggaagcgaaaaccaagttaagaagtcctgttatttgggtgagtccagttcctataaaagttctgttggatgtgtcttaaattgttcggtgcacctcagctctctcccgcagggatccggagaaactgcgccattgttgtcttacagagaaacaaccttctaacactctcttcgccgccatctttttcaagattttaaattgaaaatactttttttgacggctcttgccattatgtctggacgttttaatttcaacaaaacgaaataatagtgttaagttctttgagtcaaacccgatattacagaggtagggattccaggatattagaattttactataacacaaatgaaacacaaagttccttatgcttaacagtgtatcttagaaaaccttgtttgagtgaattagccttgtactctataatgaaacgaggaatcattgagagatacttaggcaacggattttaaatgagtgaataaggaagggaaaaacttcaggaaaatgcagaaaaaagcagcggagattttggaaaaaaaattctaaagcactttctaacgcaaacacattcgattttttatagctaaacaggataacagatcagtctattaagttaaatgatcaatgtctttgcaggtcatggtctacgtgaaacatcaaagaaacctgtaacggaaaacgacttgtttgaaagagccagttctctatccaaatttaccaatcagaatcttgcactgaaaaaataaaccaatcgtgaatctctacggccacttccggaatttagcaaccgatcactaacagggatcgtccacaatccaatcagagtgattctgttcctatatagaggggcaaaccaatcttcctaactcatttactttgcagatgaactatggcgcgtactaagcagacggctcgtaaatccacaggcggtaaagcaccgcgcaaacagctggccactaaggcagctcgcaagagcgctccggccacgggcggcgtgaagaagccccatcgctaccgccctggcaccgtggctctgcgcgagatccgtcgctaccagaagtctaccgagcttctaatccggaagctgccgtttcagcgcctggtgcgagaaatagctcaggacttcaagaccgacctgcgcttccagagttccgcggtgatggcgctgcaggaggcctgcgaggcctacttggtggggcttttcgaggacaccaacctgtgcgctattcatgccaaacgcgtgaccatcatgcctaaagacatccagcttgcccgccgcattcgtggggagagggcgtgaattgttttgagtacaaaccttaaatccaaaggctcttctcagagccaaccactttgtccgtgaaaagggctgtaatcctttgagacgcattagaccactaaactgcactgatccaaatagacatttgaaatagtggcattcagttccctcgatgcttcatttaaatttccaaatttaagcgctccctcaggttttcgcctagggctgggcctccctacgctgttctccattggtttagctggctttgttttgctgttcaggccctctgctgctttcttgtacattgttctcgttttctaaactcctggccacttaattgtaccctgcttaacccatcctcttgttttctggctcaacgctctttcatgtggtggcctgcattttaggtcttaactgcataggctttcaacgccttggttttgcctttccttgatgtttatttgaccttgcccgaggggccagcgcttttgatctgcatcaggctgccttactccactagtgttttgagacccagctacttgccggcgacggtcggtgccttgggtgcggtcaacgttactctctgtgcgcctgatactggtctaaggctaaggttattagctggaacacctagacccgtggcactaacacacagctcttgcagacttgacagccttgcataggttctaaactgcaggagtcaaagcaacgaaggtgcagatgggtgtgtctcaaacctgagtgcgaaaggaaaatgcagaaatcatgagccttttcaactttccagttgatatcttttgtttgcttttttcttttcttatttatttatttatttatttatttatttatttatttatttattttgagacggagtttcgcccttgttgcccaggctggagtgcattggcgcgatctcggctcaccgcaacctccgcctcccgggttcaagcgattctcctgcctcagccttccgagtagctgggattacaggcatgagccacctcgcccggccttccggctgatatcttaaaagaacttttcaactttagtaaataccctgtcttaatcaaatctcattaaaagtaccccatatttatcaacaaaacatgaaaatccttggacggcttcaaagttcttacagaaaatattctgcctttcctttccatacaaaggcacagcttcgaaactggtaggtgaagggaaggaaaataaggaattctgttacgaaatcatacaggctgttatttggaaatacagaagggtgtatgtactatatgggatactgcatgctatttggaagaattttgtttatttaaacatttcagcaaattcctcagttttgatatggggtgcagtatttttaactcattgagaaatttctactaacttttttgaatgtgctcttttcccactagttgcactaaggaaagaggttagtcatgtggtaaaattaatagtgacaaagctgtaaatagctctgcaggccaaggtagccatagtaagaagtcctggagatttatggaagaaatttttgttcatggaagcctgtcagacatgaagatgtgggtcttgtgaattggagattcagtgcgtgaggaaaacagcctaactatccataattaaggtaactactgtcagatatttgtaacatagtgaacatcctattatgctagatagaagcattctctatttgaatgttgtttcctgtatcctgtactttctttaagattctagctcaacaagttttaacctgtatttctcttacagctactggaattcagtacgtgaggacttggacttggtgggcacagaatgcatctttttatatcattaaatccaccagaacatctagcatggtcatttgcctaaaacaaagcctctggaaatttagtcaagttgagatgtaaaataaaagattactgaacagaatttaacattgagtgcattcctatttacaaaaataaaagattagataaagtttatataattttaatatatagtttttctaaataggaaaaatccacacttattgagtggctgcaatgggccagaagtcatgcagtattttatgaagcctccaaaaatgtaagttcaatagttatctattatcaaaaacaaatttaaaaactgaaactaagaaaatttcagatagtgctggagccaaaactttccccactaggcattactgttttaaataaacagcctcagcagaatcctcatcagttactcctgagggctttatcacctggaagagctactaacatgtttaaatttttcatacacaataaaataaatggatgttttaaaatttacagggtcttaggccaggcagggtggctcatgcctgtaatcccagcactttgggaggccaagccaggcagatcacctaaaatcaggagttcaagaccagcttggccaatatggataaaccccgtctctactaaaaaaatacaaaaattagccgggcatggtggcacttgcctgtaatcccagctacttgggatgctgaggcaaggagaatcacttaaacctaggaggcagaggctgcagtgaactgagactatgccactccactctaggctgggtgacaaagcaacattccatcttaaaaaaataataacaccagcctggccaacatggtgaaacaccatctctactaaaaatacaaaaattagctgggcatggtggcagacacctgtaatcccagctactcaggaggctgaggcagaagaatctttgaacctaggaggcagagctggcagtgagctgagattgcaccactgcactgtagcctgggtgacagggagagactccatctcaaataacaatactaataataagaaaatgaactttacagggtcttatatgattgtgaagttctattatattataattagtactgc

SEQ ID NO: 444 - DNA, 8060 bp, Homo sapiens
tcagacagattcatgtcttccaaaagattacaagaccaatgtcctaatgttttagtttgtggtaagaaaaatatagtctatcaccttattccaggggtgtagtttttggccaatgcatatttatgcaacaggatgaaagttcaaatagcacacttatgcaacaggatgaaagttcaaatagcacacttatgcaacaggatgaaagttcaaatacataaaaatctattaaaaatccttcaaagtggactagggtcctacgaatctgctgagaagcctagtatctgacctatgcatgaattgataactgattctgattttcttacagatattcctgaaagaggatagagcttggtgttgagaataaactgggcagtaatggtgatgaggttacatcatggccttactaggaaatgtttttgcttttttttttttttttaactaaaaacatagattttttttttttagttcatactgtgccagatgttggaaacacagtcgtaaccaaagataatttagatgttcattaaaaaatatttaaaagacgaagacaattttaattactcataattaacattattttcagaaaaatggctaaaaatcttataaacttccttccagtccatttttgcatatgtaatacttttttttttttttgatactgagtcttgctctgtcgcccaggctggagtgcagcggcacgatcttggctcactgaaacctctgcctcccgggttcacgccattctcctgcctcagcctcctgagtagctgggattacaggcacacgccaccatgcctggctaatttttgtattcttagtagagacgaggtttcaccatgttttcccaggctagtctcgaactcttgaccttgtgctctgcccgcctcggcctcccaaagtgctgggattacaggcatgagccaccgtgcccggccctgcatgtatatattttattaaaagtaaaattgggccgggcacggtggcttacgcctgtaatcccagtactttgggaggccgaggcgggcggatcacctgaggtcgggagttggagaccagcctgaccaacatatagaaaccccatctctactaaaaatacaaaattagcctagcaaggtagtgcgtgcctgtaatcccaactactcgggaggctgaggcaggagaatcgcttgaacccaggaggcggaggttgcagtgagccaagatggcgccactgcactccagcctgggcaacaagagcgaaactccatctcaaaaaaaaaaaaaaagtaaaattggaatgctattaggtttagaattctacttttcccaataatatggtatgcatttctccaagtaagtcttcaatagcaagatatttatttatttattgagatggaatctcgctctgttgcccaggctggagtgcagtggcttgacgtcagctcattgcaacctctgcctcccaggttcaagcgattcttgcgcctcaacctcccaagtagctgggactacaggtgtacgccaccatgcctggtttgtatttttagtagaaatggagtttcaccatgttggccaggctggtctcaaactcctgacctcaggttatctgcccgcctcggcctctcaaagtgctggaattacaggcgtgagccactgcgccaggaccaatagcaagatatttaaacggaagcattatatttcattgttattgatttaactattttccttatattggatttttaggtaatttccattttttcactactcaagactacatccttgcatgaaaatctttgcttgactccgtttccttaaattcctgaaaaaggaattactgtcatagagcataaacattgtgaaggtttttggatctttttttccaaattgccttccagaaagtttgtaataatttacattcctgccttctcattcctgcatcaacactttaatttttcccaacatttcaaaattttgttagaaaagttaaatcttactgtttcatattttattaccaataaagttgattattttttcatatgtttcttgcctgtctgtagttcttcttttggaacgcttagtccataccattagtctaatttttctatcagtgtgttggattttttctttatttgtaagagctctttatgtataaggctgttggccgaatctagtggctcagcctgtaatcccaaaactttaggactcagaggcaaggcaggaggatcccttgaacccaggtgttcgagaccagcgtaggcaacagagtgagaccctatctcaaaaccaacaaacaatttatcttatgttgcaaatatttttcttcatatgcctttaaactttatatatttttttaattcaatgaggatttacactttcatacaggtagattgatttatgttctcctttgtggtttattccctcacttatgtgtttacaaaggccttccttcacccaagttaaggtaaatattcagcatatttccttgctgtggttaagagatgtgagaagatactatgagagactcactatgttcacaactttttccagttaaatgaagtcttcccacgtttcctaatcactcacattaagcatatagaatggattaattttaaatctgaatataaaactaattgcacagcatgtttcactgctcttcttactgcctacctggggcacagtctctttggcctgagtggtctcttcagtttttaacgagtggctccacaattccttaggaagagctgctctcttctgtctccctggtggtcgtaatttcgcccacacctgccccgtctttgctctgcagctccacactccctcagccccgccgagagctcctggctcccgtctccaggttaccccaggtcaccacagccacctctctgcaccagcggcccgctcacgtacccagctccaggagctccttcacgatggcttttccgatgcccgtggccccgccggtgacgatggccacttggccctgcagcaaaccaggcgccaggtagctcctgcccttagcccaggaggccatccctgcagcggggtgccagagcagctgagcgcaggcccttctgggtctcagggacattcgaggcgggcgggcggacagggcggtgctcgagcccacgtgaccaccagaaccccgcaccctccccggcccggccccgccccgcccgccggccgcggcaaagccgcatcctcccggagcagaaccgctccccgccggctgtccgcaacctccgccagcgtcggtccctgggcaggtgtgggtgagactgctcgttcgtttctttaaatttcgatgccattggggagggtggaagggaaatgcaaaaaaaaaaaaagaagaagaaagaaacaagcagggtgtgctctatttcaaaaattcaatcctcagggctgaagctctcacgattaattaaaattaaatctccagtgcagctggaaaaagaaaggctgctgctcggcgccctcgctgcgcccgcctgccggggtcggacgtcggcgatgctgtggctccaggtgctgtgtgccgctggctgggaaggggagaaagggcaggcttagctgagggggagaaatgcggctttcagatcctttcatccttcgggagggagcccgggaaagagagtgaaggggaagaggagatgcggttgcagttttccacagaaccaagagaataaacgatttgaaaaaataaactcaggcccacctccgtctcacctcccactccccacccaagaatcaaggggaaagatcatctttaccaggtttgagacctgatccatttcagctgagctgcatagcgagtccagaagaggatctttccttgaagggtgcacgcttcctgcaagatgcatctgtaggtgtttgagatcatgtcctgtagttcattccttgtgcaggagggtgagcccgctgaggatggggaaaatttctcgtctgtgttatggtgcccagtaacagtgatttattattcagatctgctccttatttttcatcttgcttcccgctctgaacccaccagagtgagattacacctggactggcctactgagacttcaccctaagaacttggtcgaatgtgccagttgctgtggtcttaacaatccagatgggatgctatttctaaggctgttgtcagagtgttgcattttccccggacaggtattaaaataatataaaggcaaataaatgccatcatccttttgttggacctaccacctaggattcacaaagccaattggaaatgggtctggttgacagaggaatcagaccatcacttcctccaccaggtcccacccaccagcgaggctgcagttcttgttggacagctacacttccctgttgctccatcctcttgtccttctctgatctctttttagaatcacttctccctctatctttgttgctgacagattcaaatctacactcgttaaagaaaggaataaatctcctggttaccatttgctagatagtttatccaggaatcacttaactctactacttaagtcaattctgtagttaggaccaaatttttaaaattacaacgccatcacctcctttaaaacaaagtaaattcaaacaggaaagctcaaagtgttgttgcagaaacatataactcctcttggtttgatcccaatgacaaggtgtttttttttaaggaaaagaaatattgattcagttctgaggggtatcttattcaagagaagtccagactttctttcttgtgggtggggacactttaaattcttttaaatgataactttattgaagatataacttaacatgatttatgccctggtctggacctatagattcttagaggtgtgccagggtgggtcagtgggaagctggctgtgctgcagcttccgtgtggctgctgagcggactgagagtgggattctgatgtcttccagtgaaacagggactggggcctgcaaaccggttatgcctactgaggatgacaaggtgccattcctcagctgcaaggaagttgcaggatgaacagtcagaaggcgatttttcatgatccaggcagaacctgcaattaagagagctttggggtctcttcaagcgatcttttgtttaaaattaggaggcatgatctctttgcctctgcctctgacctctgtcagggtttgaaagtccactaatccgctaagttccaggccaaaaggcctggaagcagagcaatagatctgctgcttggaagctctttgttttgaaattttagttctgcctctggttgaggcatctcttccgaaggcaaccacgccatgctgcactgaccactcctttggttgaatcaaatgctgctcttccctgtgctctgcgtcactgccctctttgtcctggggaaaaaggcattcctgtggccaaggtcctcccacacccccgaacctctccccacagctctgtcataccccattagcaatgactgccttcagcttcccacccctcccccaccccatctgcctggtaactttattttctcccctctgcaaagcagctgctagctcagactgacaggggcttgtgggattctcgacatttagactcccagaatctcagtgctgagagaatgtcagtgaagcatctggtcctgcccctaccttgaagcaaaactacctagcaattgtgccataacaaggcatataaaggagcttattgatgtctttttattaaacttctccttagtctcaggctttcacaaaaaataagctactcctgagttgctaccacttcacccagtcacttaaaaagatttatcgagcatctatttgttggcctacttctatggtaccacttcatagggcttgaagtctagtagaagagctatgcaataaataagtaaaagaaaaataaataatgacaaatgttggtaagccttacacaggaaacaagctgttgtgataaagaataatgagaggcagagcagggagtcaagtttttagttcgggtgtcaagaagggctcagaggaggaaacatttgaacaaggactcaaaaaaacaaaaacgggcacaggaagaggcggggtggagcagcagagcagcaagatagacagcagttaagaagacctcaagcatttggaagcatttggtgctcttgaggaagaaatacacagccagtgtgattggagcatagtacccctactatggtggtacagatggggtggcaggatggggaggtccttaggccacatggacttccacatgtataacagtaggaagttacaggaggattttaagcagaaaacagcctgattttcttttttatttttatttatttatttgacatggagtctggctctgtatcccaggctggagtgcagtggcagcgatctcggctcactgcagcctctgcctcccaggttcaaacaattctcctgcctcagccttccgagaagctgagacgacaggtgcgcgctgccacgcctgaccatctgattttctttatgttttaaaaagatgtttctggctgggtggctcatgcctggaatcccagcactttgggaggtgaaaccccatctctactaaaaatacaaaaattagccgggtgtggtggcacacgcctgtaatctcatctactcggtaggagaatcaggtgggggaggtgggggttgcaggaagctgagattgtgccactgcagtccagcctgggtgacagagtgagactctgtctcaaaaaattaaaaaaattaagtaaaagatgttgcttactgctgagtgaggaattgattggaaggcagcaagagtggaagctggaagataggagcattttttttagaaccacagttaagagacagtggcctcctagaccagaggggaagcagtggagatgggaaagttgggtggatgaatttaagaattatctgggccgggagcagtggctcacgcctgtaatcccagcactttgggaggccaaggcgggcggatcacctgaggttgggagttcgagaccagcctgaccaacatggagaaaccccttctctactaaaaaatacaaaattaactgggcatggttgtgcatgcctgtaatcccagcttctcagaaggctgaggcaggagaatcgcttaaacccaggaggcagaagttgtggtgagctgagatcacgccattgcactccagccaaggcaacaagagtgaaactccatctcaaaaaaaaaaaacaaaaacaaaaaaagaattatctggataatttttttcaagagtggcttaaaagcagttattctaagcacgagttccagagtatgagcatgttcttaaaaacctgttttccctcctacaatgaccaagagtacagagctaatggttgattgaagctaacactctgtaatatcacatttgtaagaatctttttttttttctgaggcagagtctcactctgttgccccggctggagtgcggtggtgtgatcttggctcactgcaacctctgcctcccgggttcaagcgattctcctacctcagcctccggagtagctgagattacaggtgtgtgccaccatgcctggctaatttttgtatttttagtagagggggtttcaccatgttggccaagttggtctcaaactcctgatctcaagtgatccacctgcctcggcctccctaagtgctggaattacaggcatgagccaccgtgaccagcctgttaataatctttagactggaagtggaagtggaagatgggcacagcttaactgccagagaaaagaacaaagtcctctctcttctctcaagtctattgattaaagccttggaaattgggtaaaattttcttttaacctctctcttgtgaaatctaaaaggaaggagaaatgtttagaacctgcttctcagatcaaatacttacagcataataaagtatacaaaaatggggaagagaatcaagcctttctttcttaacagttgtttatgtcatatttctggtaagacattttctcttctgtgtcctatgaagtcaacaagtacatactgactttgtactacatgtccagccctggggttttcccattggtggttaagaagaagagtaagacagttcctaaactctagaagtttgttatctacctagaaag

SEQ ID NO: 445 - DNA, 8060 bp, Homo sapiens
tcacaccactgcactccagcctggctgacacagcaagactccaactcaaaaaaaaaagactcactattaagatggtcaatatctcaagctcaggcttggtcagacctataacatgctatcacaagtacgtgttaaagggctatgcagatgagggatgcattaaattttgaccataggaggccgcattaaccaaattatattaaattattatattaaattagtaggcctcattaaccaaattatatttaaatattatattaaaaagttcagagacatttttctttttaaaaagccacacatctagtgtatgtgttatgtgaacataaagattattctgtttagcacaaggtcgtacttctgcgtgcaggtgtagatgttcctagggtcaattattcaagcgaccttagctacataggagaaataaattttatctctctctgggttttttggaagaattcacataaacttctgtggatacccgaaaaccgaagaagactatggttttatcttgtcacctagcttatccagtttactgtcactatacatttcctttcctatgtttgtctcctatttagtaaagacttgcagccttttcagcctggcctcagcttggctactgggcattaatccctgagccactcatttttgttttttccttccttcctttctttttttttttttttttttttttttttcagagacaaggtcttgctctctcacttacactcgagcacagtggcacattcatagcttactgcagccttgaattcctggaatccagcaaccctcccacctcagcctcctgtaactaggactacaggtgctcgccaccatgcatggctaatcccagagccatttgtcccagggtgttagagagggggctgcttgctgctcctaggccaccttctcccacctctgacaactttggaggggttgtttttaattagatttaggaaggtaatctcatcactctccatgagattttcataaggggagggaggagttccaagaatccttttttcctctgacccatccttcctcagctctgtactcaatgggtggtagggatgagggaaaaagactgatgttatagctcaaagttgttgactgcctagaggcctagaaatgtgttagtaatgaatctggggtaggcctgagtacgtggagtgtatatgtaccggtgtgtttgggtgtgtaaggaggtaggggtgggaggagcatggaacatagttctgggcagttgcacaagtagaaggaaatcctagttctactttttgatgatttaacatttattgaatgacacacatgtagggcaaaatttgagagagtttgtactctaatgcaatggctggatgaactctcaatctttgccctacatatggtggcttagtttttccaagagcaaatctacagtctctactctgcctatgggaattagattgtcctctgatcagtcgcaaaataaacttctttatcactttgtaaaagaactgtgtctccattgctatttctaccacccaccccttgcccctgatttgcagctgacctttatgaatgtattttccgaactcagccagggctgtagtattggacttctcagagctaaaagtcactgttggaatctggatggcacctgtcagagtcaaatagagatgaaagattgaaaatgaattagtcattgtttttttctacagtcctctgtgcacaaaaagttcttttgccttcattatcatattgcagagggcaaaacactaatgtgaggtaggcgctattgtttcctctaattcgaagatgagggaaaatgcttggagaggttaggtgagctgtctgagcaacaggcagactatagatttaaacctatgtcttctgggtttgtttaggctgatatggttcttaaaggcaaatacagtctaagattggagggaagtggatttttggatcctggtcttgaagggaagctactataaattgcttcctaaggcctcactacctctgaaatcaccaattgctttgatgaatccaagcttcatcattctcaaggcacccactgtcctgggtccctacatcaatgaggcttgtgtgtttttgtatgtaaaggcttattccttatgcagagtctcactagtctgtcaaccaagaccagctttttgggcatataatgcctgggaaggggtggatttagaagcctccaaacaaactcctcagtcctaaaataatctcaccctccttactcagttgtctcagttcctgaaccttcactgggctcatccctttgagtctttaagactttacagttttaaagagttccatgatcaaagacaaaaccactgggagggaaagcatgaatcatgagaatattgaattagactgctctccaagaacacagtgcaaacaaattcacctgaggcaggaagggtctctgaaagacaaacttcatcagttttgctaaggatcaaccctacaatagcatagcccaccagatagatggggaagccgaggttcagaaagattcaagtgcctactcaagggcagacccaaggatctgatctcaggtgttctgtcccctgctcagagttccaagctgtgttgctatgaggtccctattctagcttatgtagcttttgttctcttctgtgcagactgtgagtggctgtctaatgccttttagagaattatttatgctttgggaaagccctgctctgcctcccaggcttgtcactctagcatatgaacaatctatatccaactattggggttagcttttggtccctgcatctgcttctatatgtttatgcaggcagtctctcttaatccattacttaatgaaagggaaaagactggagctaagctgaatggtaaagaaggatttcatcccataggatctagcactcaacagaaactttcctgtttcctggaaaatgcagattcagaacagggatgaatttttggtctggattagagatctagaggagacatgttcttcaattatgattgagaattaggaacatcccacaccccgggaacactccactccctttctttagagccatctgatcccagcgagtccgacaggcactagatgctgtcacccactgcccactctttgctgtggggccctggggaagatcatttagctgacctaagcctcaatttctctcctttgtagataagactaatatcatttgtcttattttacgacaccgcagtaatttatcaggcatgcaaactttcaaaggttaaaattgatgtacaaatgaaagctggtgtaatactcgaggcaagcaggggaaagaatggacggtggtcacgccaagaggggtgaagttggagcttccaggttaggcagggcacaccagagttccaggagccaggtatgggggaagtgtggcgtccccagacaggggcacgatgtgctgggaagggtgttggggccgggctggggtgcgtgtcggggctccagctgcagtagcagatgctttgcggcggaagcggggagtcacgggttgacctggggagggagggacccacatatgagcataggtgggtgaaggggacccgggttcacctttcagcgcctctttcatcgcgacgcgttcctctttgctgaactgagaagggattcgcgacgccctttgatgctccccgctcctcgggcccatcgatctggagacggtagggaaaactaggagcagcatagccaccagggccagcacgcaaacgcaccgctgagccatgcttctctcgagctcctgctgtcaggctaccggggtagttctgacctaaacgcccagactagcgtttcttggccctagctctgctcttattccggcaaacagccttagccacaccccatatccagatctgaccaatcatcgcttcgctaggacagcggaacaaccaattgacagaatgaccccgcccaggatccttaaggcctttcgagggttgtgggttttcgtgctgaggccagcagttcctgcagagcagaggtgaggtcgggctccaggctagagtcatgtctggtccgcacttgatctctcacccataaatcctttcctgtatgacaacaaatcaaataaaggaggaaaagcaaaataaaatgcacgaagcttatcagaccatactctgctgctcgttttttccgaagcttagaacctgactacaattccctagatcctggggcgggggagctctctaggttcccagcttgatttcatctgaaattggaacaaattgctctgtttatagatactgctttgaaataccagctcagagggttggctcctgtttagaaatttcattgaaagtgcttttaatattaatgttaacactacatttttgcaactctagacaagtacagtaagactgaaggatttttagaaagattactataaaatatttaagagaattttgatgtataaataattttgatgtattccacaagtgaaattttatggttattcagagtagaggatcattctggaaaaaagaaaacctgtcttatgtcacagaaatataaaatcagatttcctgaagccagaataaatcgttcctttcagatttcttgatgcaattttatctggcatcactctcaaattttagaattctcaagaaaaattcagtaagtgctatacaaccagtaaggccatattgctacctgtgaccaaagctacaggttcacagtcctggtgtttgcatttcatttaagatttgcttaaaaaaaaaaattcagccatgtagttacttttcttttcttttctttttttttctctctcggtgcccaggctggagtgcaatggggcgatctcggctcaccgcaacctccgcctcccagtttcaagcaattctctggcctcagcctcccaagtagctgggattacaggcatgcaccaccatgcctggctaattttgtatttttagtagagatggggtttctccatgttggtcaggctggtctcgaactcccgacctcaggtgatctgcccacctcgacctcccaaagtgctgggattacaggcgtgagccaccacaccctgcctagttactttttaatagcaactttaaaacagtatcatgaaatacttcacatattataaagatataaaaaataacataatgaacatttctggattcaccacctagtttaagatttagaatgttaaaaatagagttgaaatttaaacatgaacattgacataatttttagtaaaaagtagcttaatctctacctaactttaaaatttttttaaaagagactttttattttatatatttattattttttaaaattattattatttttgtagagatagggtttcactattttgtccaggctgctcttgaactcctggactcaagcaaccctcccatttaagcctcccaaagtgctagtattacaggaatgagccaccacacccagcacaatttttatgattgtaaaattcatgtatatttatgcccttgtgaaatatttggaacattaagtataaagaaaaaaatcacatgctatcccaatatccagagacgttcactcatcatattttgatgttatccaatcttttttctctgcacacaaatacccacaaatgaaggatgtccctgttttaaaatgaaacagatgcatatactgcatccaaagttctatgttctgctttttttcctttaacattatgtcataaacacttcctggtccttaaatattctttaaattatcttatcacataatatttgataattaagagtacgtacaacgtgtatgtaaagtaaataataacatgaacacccgtgatttggagtttagacctaactggtcaaactgcattttttctcctgtcactgctccaattcttgcaatctgtctaattcccacactgttcccagatctagccaatcatggaaaattatcagtagcattgaaggtgcatgtgttctattgcctttattttccaactccctgcccaaggtaattgtatgaccgtgttgtgtgttttaaatagttctacaacatatgtatgatatacatatatgtatagtgtgtgtgtgtgtgtatatcttataaaaatgacatcatgttgtgtgtagtcttctgcaatttgctctttttacccaacactgtttgtgggatttatgcatgctgttatatcttgctacagtctattgacattattgtacatgtctcctgggccacaggtaaaagagattctctggaatatatatctaggagtgaaaatgctgtgttgtactgtatgttctattttacaagagaaggctgaattattttccaaagtgattggaacaatttatactaatcagcaaggtagtgcatagtatataagttcctgttgcttcactttctcactagctcttggcattggcatttccaatatcttcattttgcccatttagtgcctggaaaatatctccttgtggtattattttgtactctctagtttgttaaagagtttaagctttatttatttatttatttatttatttatcatagggtcttgctctgtcacccaggctggagttcagtggcacaagtatagctcactgcagcctccaactcctgagctcaaagaatcctcttgccgcagccttctgagtagttaagattgcaagtgaacaccaacaccttcagctaatttttagaagtttttttatagagacagtgtctctctatgttgcccagactggtcttgaactcctggcctcaaatgatcctcctgccttggtctcccaaagtgctgagatgacaggctgaaccaccatgcctggcctaaacatctttaaatatgcttatttgccattcatgtttctctggtaaaatgactgttcatatctattgcccatttttgtttagagctgtcttcttattgaattttaagggtttctatatattgtggagtctaaaattttgtcagttttatttaaattataaatatttctcttcatttgtgtcttgtgtttttatttttttaatggccttttgatgggttgaagtcttaataatatagttgaatttattattatattcttttataattagtgatgttttcttgcttaaaaaatcttaacaaatctagtccaaggtcataaatatatatatatatatgaatttttagtaaaaaatagcttaatctctaccaaactttaaaaatttttaaaaagatactttttattttatgtatttattatttttaaatttattattatttttgtagagatagggtctcactattttgcccaggctgctcttgaactcctggactcaagctttttcccttatcttcgaattagagaaaacaatagtgcctacctcatattagtgttttgccctctgcaatacgataatgaaggcaaaagaactttttgtgcacagaggactgtagaaaaaaaaatgattaattcatgttcagtctttcatctctgaccatttgactctgacaggtgccatccagattccaacagtgacttttagctctgagaagtccaatactacagccctggctgagttcggaaaatacattcataaaggtcagctgcaaatcaggggcaaggggtgggtggtagaaatagcaatggagacacagttcttttacaaagtgataaagaagtttattttgtgactgatcagaggacaatctaattcccatgggcagagtagagactgtagatttgctcttggaaaaactaagccaccatatgtagggcaacgattgagagttcatccagccattgcattagagtataaactctctcaaactttgccctacatatgtgtcattcaataaatgttaaatcatcaaaaagtagaactaggatttccttctacttgtgcaactgcccagaactatgttccatgctcctcccacccctacctccttacacacccaaacacaccggtacatatacactccacgtactcaggcctaccccagattcattactaacacatttctaggcctctaggcagtcaacaactttgagctataacatcagtctttttccctcatccctaccacccattgagtacagagctgaggaaggatgggtcagag

SEQ ID NO: 446 - DNA, 8060 bp, Homo sapiens
caaagccacctcaatgtgtactcattccctaggtgtcattcatgtatatgtaatatatatgttaatacacttctgcttgtttttcatttgtgaatctgtcttttgttacatgggtttgtttcaactaagaacctgtgtgaggtgggaattgaagggaaaattattctgccctttctccaccttcatttcctactgtcccctgctcattccccatagtcaccatggtgcctcaggagtctccctccttttctccctgaacacatccgcacaggttgcttcctcacctttcagctctttgctgaaatattatcttcttagtggggtcttcattggttgccttatctaaatttcagcttcccatgacactccttagtcttgctctatttttttttccttctcaccatctaacatattacataaacatatctagtttattttctgtctattccagactcaaatgtaaattccatgaaagcaaaaattttgtgttttgttctctgggtgtatttccaatgcacagaccagcatctggtacattgtaaattctcaaccagtgttgtttgcagtaaataaaaatcaatgttgaagaaatatgtcaaccaaaatggatcatattaaatttttaaaaaagaaatactatttgttataaaagtaatgatggcatcataatttatttttgtttttatttttgagatggagtctcgctctgtcaccaggctggagtgtagtggcatgatcttggctcactacaacctccgcctcccaggttcaagagattttcctacctcagcctccccagtagctgggattacaggcgtgcaccaccaggcccggtccagctaatttttatatttttagtagagatggggtttcaccaagttggccaggtttgtcaagaattaacctcatgtgatcctcccacatcggcctcccaaagtgctgggattacaggagtgagccaaggcacctggtccataataaggtgttaaatagcagataacatatataaaatagatgaaatgatattgaaattgtcattgcaacattgtaactgagacaaagagatctgacctaaccaactccatcttgcttctaaccttcaagctgtccttgttcactcctgggtgtaggctgaactacctttgggaggaacttagtttatagtttaaaactaatatgataacagccctttcccaaaacaaacctccttgcctggggactagactgcctttgtaggactaacaaattactcacaagattagaaattatggtttaggggtaggtcgtaatggctcacgcctgtaatcccaacattttgggaggcgaaagcgggtggatcacttgaggtccagagttcgagaccagcctggccaatatgaggaaacctcgtctctactaaaactacaaaaattggctgggcatggtggcgcgcgcctgtaatcccagctgcttgggaggctgaacaggagaatcgctcgaacctgggaggcagagtttacagtctccatcctgggcaacgcagtgagactgtctcaaagaaaaaaaaaaacacacacattatggtttaggagtcctgcagctggaacctacaagattctgaccccacgtaaactgctcctaagatcagtgcttgagatattttgcagacctgatggatcagttggccccacccagattggtaaactgactcatccgatcttgtggcctccacccagaaactgactcagcccaaggagacaccttcagctccctataatgacatctctgacctgaccaatcaggactcctggttcatcggcttcccccccatctggaatgctggggagactgatttgagtaacaataaaactacggtctcccgcacagctggctcggcgtgaattactttctctattgcaattccctgcctagataaatcagctttgtctaggcagtgggcaaggtgaacccattaggcagtttcattatttgctttacaaaaatcaatagataaaacacttagccaatgttgttattgaagctggatgagaggaacataggttttattaaactattatctcctttcccatatattctggaatgtcaaataagtttttaaaataaaagcaatatgtgaaaaaaaatgacaagttgctaaattaataaagatcataaagaaggatctgctgaatacccaaacagggccttgtgctaatctgtaaaggaagggttctatatgaaaacatatcttggttgtatgccaagcagcccaggatggtatgtgttcctccttgtaacatccctaaaaacctgatacttccaatcactaaaaggacctcggtggttcaaaaaaacaaaaaacaaaacaaaacaaaaaagaaaaaacttacattagtgttgccctaagaaattcttataaaagccaggtgttgaaagatagtcaagcaagccagaaagtctttagagaccagtatattctctctgaaggcaaactacaaggaaactgattcaattagaaaactgctaagcctagagtcaaaccagagctaataagagtattaaaatttatgtagcaaggagtctcagccccagctgttagaagcacctgaattttaataattaccattccctgggcccactctagattgctattagtctcattgaaccccaggtaaagatttttctaaagccttcccatgtgactgtaatgttacattgagaaaactgatctgtaaagaaatcaaactattttaggggattgttctgtgcacttgctttagagaacatttcatagaatatttcattctgtaacataaataaacatgcattttgcaaaagctcactccttgtaagagttcacaggcaggatgcctttactgatgagaccaaaaccaacaacctaggcttcctaaatcagtgttcatgagaatcatctgaggtatatgcagattgactccagccctagatggggattgaaacaagctcccatgtaatgccctgggagcttctaacaagttcccacgtaatgcccatgctgccagtaatgtagaggccaatctggctttcgtttctgccgccaatttctaatattgaattaaaaaatggatcatttcacagaaaaaccaagaactgtttaaaaaaagggggaattgtggaaatagctgcttcagacacgaaaaagcagcaaccaaggatatccctacctactctcaactgccaatgctcatacctgtaaagttttaaaagggattaaccagaaatacacaacgaaaaaaaatcccatctataatgggtgtaagtagacaacgcgactaacgcttgagacaatgtatataaacgcccccaggtggccccttccactaccaaatcgaagctccaaacccctaaaagccagtttagaaaaggacgctgacaatctggcactttcgggaaaaagcacgggaacaaatatagcaagcttaccattaactttagccaatcaaatgaggacttaagtactaaaaccaatgtttagtttcaaagatttgattagttaatcacagctattttcgggtgaaagtaggcggctcttaaaagagcctttttaagttggatagaattactgcccggaaacctctacgctctctccccacgaatgcggcgagcgagctgaatgtccttgggcatgatagtcactcgcttagcatggatggcacacaggttggtatcctcaaagagccccaccaagtaggcctcgcaggcctcctgcagggccatcaccgcggaactctgaaagcgcagatctgtcttgaagtcctgagcgatttctcgcaccaggcgttggaaaggcaacttgcggatcagcagctcagtcgacttctgatagcggcgaatctcgcgcagagccacggtgccgggacggtagcgatgaggtttcttcacgccgccggtggccggcgcgcttttccgagccgccttagtggccagctgcttgcgcggcgctttgccaccggtggacttgcgtgcagtctgcttggtgcgggccatctcagactacctgaaagaaaaactcagccacttggcagagtggaaactgcccttatatatactcagaaacattctaattggccttgttgattttcaaaagacccgcgcaacaaaaccattggctgaagagtccaacgatgtgattggtgaattactggaaaatctgattggatgaatcacttcatttttgaatcctctcttctcggttagtctgcgatccaagaacgttaacttcttaaagttctaattctgcgcttctcaagctgtagtccgtaaacgactactttaagacttggaagacgctaattctcattcagtagatgtgttgtggggccagattcggaggaccacgttttgagaagtttatcttgtgccgttttcttgagtcacctggactgctgctagctggaaacctttgaccattataaggcaggattcctgggtgatgtacctgggaaatcacgagccaagaagtcaccgacatacaacagtgagcaacaaatgttaactgaattctattttgtcccaaatggtgttttgcttcggttgagaatttttaaggcacaggctaattttaggttttccaacgactcttatcatttacttttcgttgggtcctattgatgatattccaggataccacccccactagcctcttctgcaggataacttgaacactgcagtggccctgtccatctaaactttacaaggttttgtaaacgttactgaacttgcttcttcccgactacattaaagcacttacttgagatattaaacattttctcattagtcctgtttgcctagtcagtcacttgtatagacagggcaacagcacggcctgaatattgggcaggacaccgccctgcgcgatagtaactttgcccaacagcttgttgagcttctcgtcgtggatggcgagctgcaggcgtcggggggtgacgcgggtcttcttgtctcgggccgcgttgcccgccaactccaggatcttggcggtcaggtactccagcaccgcctccaggtacaccggcgcaccggcccggacccgcttggcgtagttgcccttgcggaggaggcggtgcactcggcccacagaaaactggagaccagccctggaagagtgcgttttagccttggcgcgagctttgctgccctgcattccacatccagacgcagtgaagtatttaaatacttgtttagaagaaggaaagtgattgattctagtaaaacgcaagagctaaactcttataatctatattcggcaaagtagactgtgctatctcctgaacacagatttcagccaatcgaaaagcaggtgtttaaaaaaatttaaaaaaaaaaaaaaaaaaaaaaccacttctgacttacatacttatagttgaaaggtcaaattatgcaaggttgagcttctgggagagccgatgagatttaggagttcagaaatggcctatcatatattcagacactaaaagaaccaatgagaaaccgaaactcagccagcctcatttgcatatacacgaggtaaataatgagggcgtttgggctcaccagcattttcctgtggtcatttgacggtatcacttcggctgcgaacatgcctgaaccagctaagtcagctcccgccccgaagaagggctccaagaaggcggtgaccaaggcacagaagaaggatggcaagaagcgcaagcgcagccgcaaggagagctattccgtgtacgtgtacaaggtgctgaagcaggtccaccccgacaccggcatctcgtccaaggctatggggattatgaactccttcgtcaacgacattttcgagcgcattgcaggcgaggcttcccgcctggcgcattataacaagcgctcgaccatcacttccagggagatccaaacggctgtgcgcctgctgctacccggggagctggccaaacacgcggtgtcggagggcaccaaggcggtcaccaagtacaccagctccaagtaaactagttacctgggtaaaagcgctaacgacccaaaggctcttctaagagccacccatgttgtcatttaaagatctgtaattttccagacttggcattggcaaggtaaaatggctaagcaacacatgggatagtaagggtttactgaaacatccaagttcggccgggcgcagtggctcacgcctgtaatcccagcactttgggaggccgaggcggtcgcgtcacctgaggtcaggagttcgagaccagcctcgccaacatggtgaaaccctgtctctactaaaatatacaaaaattagccgggagtggtggcaggcaacttaatcccagctacttgggaggcagaggtaggagaatcgtttgaacccaggaggcggaggttgcagtgagcccagatagagccattgcactcaaacctggggtataagagcgagacatctcaaaaaaaaatccaggttcgttgttttttcccctatagattgtaagcgtcaccaaggagtaagctcgtatgcagcttaatatgacacatttcactcagcagctaaggaaaaatcgtgttctagattgatccccacttttcttctccccgcacaccaccatcttaaaattttgttttcgtttttagtttcactttatcatcctattgcccttgatttggagtagccgggtggaaatcaagtttggggtagtcttaaatctaaaataaggtctgagaaagcgaaactcgtcttttagttcgttgttagcttgcaaatggttggagcggcatatgatggaggaaatcacctctgttggttgcatttctaaaccatggcagatcgctaccagacgttctcatatcccccttgcaagtccactgatttctctacaaattttactgagtttataattactggattacttcacgtagctatacatattacctcttggcaagatcaggaactctaccatcttcttagctgaacatattgaggtttaagacaaagaacaggcaacaggatagcctgaagttggagcaaagaaatgaaaattcccggtgctacattcagacgcttttatctgtaagcctttttaaggctccaaggactgtgttctccctaaacctcctcctccgtgtcctggaacgactttgtccacagctactccctttcttgaaaattcattttaagagaggagggttacaaggaattaacatttgtgtggtagtccttagaatgcattatttcattcattgattttttttttcctacagtcagctgtgaaatggaagctcctcttttacaggtgaatgacctcaagaattaaggttaagtaactagccccttacacataaataaaactgagatttgaatctactctgattctaaggattacttcccactgtttgttagagaccatcccaagcaggagcctagttgctgtcagaggagtcaggaaatttaggctcaattgtaataaaagaaaactggtcaggagatacacatattctttgttgcacagcaaagtccttacaccagcaaaagtttcttttaaaaataaaataatattaatggtgacctttgggccctaaagatcacctggcagcaagtttaacttttctgagcactgtattgtggtggggaaaacatgggcattgtcagtgtaaatgtgagctctaagatcttattttctatctattacctacatgtcattatctgcaaatacccacatagcagcttactgtgaacattaagtgaccaaaatttgctttaaattttttgttttgagacagggtctcactttgtcatccagactgaggtgtagtgacacaaccacagctcactgcattcaacctccctggctagtgttcccacctgtctcccaaggagctggcactacaggcacgcaccatcacacccactgaatttttttttttttttaatgatttttgtagagccagggtcccactgtgttgcccaggctagtctcaaagtaaatttgtaatggaatttgtgaagaaaattctctaagccccaaatataactaaggcattcatttcttgctccccaaagctaattttgaatacattttaaattatatattcat

SEQ ID NO: 447 - DNA, 8060 bp, Homo sapiens
tcttgcagttgtccaccagaattggggtcattccttctgctacttctcatgggaccacaaaggactttctctcccccctcatcctggggcaggaaggtttggccctggctccatgacttggggaggaagcactggcaggggactccctacactggcccgccctgaccctaaacgaatcaccccctttgtctgtgctctagtcctgtactcatttctcaagtgcttggcttaagagagaagtgcattttttcatagagctacactgccttttctcctccttccctcttcctctcccttccttccatcaacaaataactatgcgatcgcattccaagggcttcagacaaacaaacaaacaaaaaaacaaatactacacactaacaagcatgtactatttgccactactataggcaccggggaaacagtggtaaggaaaatatacaagaaccccagtcctcttggaatttttactccagtggcagaaactaataagtaagaaaccagggttatcagacaagtaggaggaggaggattgacaataagaaaactgccaagttcctttcaaagagctaagtcctttcctccatctataatggtttatagaaactaccttataaatatcttttccttagagacgattggtgcattgagtgcgctcagctggcagtgggcagcgcatgctccactttatgctggcacctccgtgggcatcagtctcctcccctgtggaagggggatgattgcgccttcctcacagggtcgttatgagtattctgagatcgtgtatcagcacattgcctgttgcttggtaacatacattctgtccaccatccctgccttctttcctgcttagagcagacatgggccagtaagggtatccaatcaggtcccttccctaccttctgggccctgctgctgtggacagagcaagagcttctgagctggcccagcacctcaaatgggaggctggggccctgctctgtgcctctcccctgccttgcctccagcctgctcagcagaggctctggaagatgcagccacccacccacgggcaggacagtctatgactgctggacattagccatggccaaagaggctggcatcaggtctgttcttggcagcaatagtgagcagtccctttcaggaggcccctttcacctccagcagccagcaacagcctgcaggagagagcccctggggggtgcttatgaggcactggattttacatgactttatttcatcctatctttcccaacaaagttgtgaggtaagagctgtcagtgccccattttgcagttgaggaaactgaggttaagaatttgcccaaaccactctcttaatttgtgacaggatcagcattcaagttcaggttgtccaattccagagccagggccttacactgagctgtaccctttccccctcggttatccactcctccacaacccccacaccaaaggcccagaggcagagagctccctggggcatctgggagccccaggggcatgtggaactttgcccagcttaccctgagtgctggctttgacagctttaaaacaatatgaactgtgcctaagagaaatcctgaaaaggaggaaatgcaagttcaaagtggcacagttggtgagacccccccaccccaggacatcttatatccctccttttatggatgagaaaacggagaactgtgggcagggaaagtgagactcctgcatacagaaattcagaccacactgcagatttcccagtggcctcagaagccctgtactcgtacccagacacaagcgttgaaaatggcacaggacttaaaccgagcttcaccacttacttgctgtaggattccaggcaagttgagtagccgttgagcttcagtgtcatcatctgcagttggggatatgatcatccttagctcagggttgtaggggctttagagacagtataggtgacagtacctggtaggtactgagtaaactgcagctattatgatgactcttgttttcacagttcaaagtatgtgaagaaacagtgaattccttaggtgttgctttgattctgtgatgctgctggagtccattcctagtaccagagaggaaacaacactcattgtcatttctgagcattgaaacctatcccagggagggccagttctgcacccacttgggattacaatctgaaacgaagaccacagactgtagccaaggtggcaattcctggtctttagctctgccagagtgcctatggcttcaggcacattactccacctctgtctatgtggaattcctgtcagtcaaatgagcatggcaattacttgctgtcttacccccaccccacccccatcatcccccagggaagtgcccaactaaggaacaactgtggtgaagtcatctagagaggctacgcttcacttctgtgcagtctttctggtggtgggggccaagcaaaccttctctcagggacagaactaccaggagtgaccatttggggcagatatatagcatcctcaccactgagccctgggcagtaagtggtgagatgtgagaaaccctgccacattccagcccatcccacccctccctccttccccccatggagccttccttttggagtcaccagaagccccaactgtctggtttcagtcagcatggtccagcttcatccccgtgccgaggggtgagtttggagccttttaccaggaggtgataggtgatgtgatgtcttcgaatcccacatccaaaggcaactagagatgcacagaccaggctgggatgaggggagcagcctatgacaacagggctactccccaagttttcacctggctcacctgagagatgtgtgaaaatgggggcaccaggagggtagttcccttacattttcttggttgacctgagaggcctgtggagcctgattcccaaggagcaaggtctttcctggcctcccacaaatggcaccgctggatctgccccatgattcctgcggaaaccagatggaggtttggcagtggttttctccatctatgcaaacaagccctggcccctggcgcagtcttattaaactccccaggggagagagacctgggagagcatctggcgtctccagactcctgcccctgttgtgactgccacaccttatgcctgaaattccctgctacttgtgtagaccctttgtgaggccctctttgtgcattctcttctttctaggtcccattcctgcgtgggtcacttttggacttgtctaagtgtcatcgtaattagtcttctgagtgaggatatcgtattgcagtaatgaccctgggttttcctcagcaaaaacccaactagggtttcttcacctcaacagaaatgtattgagcatctattatatgtgcggttcagtctcgagtgctggagaaatggagaaaagccacctgattttacttctatctgtcagggtggtgctcatgggatgcttgtgggggggcatgatgctgtgacttcagtttgcctgattccccagatggcttcatttagaggctggaccctatgtgggtcttcggagtagccatggtgtccagcagtgccagcaggaagcagactcctcaacaactctgccccggcattcaaggacctcctgagttcagactcacccagcctggccaacctcaactcctatcaaatcctaggccccctgcaacgcctggcagctctctctcttgaacacatcaagctcttccatcctctggatttttgcaaggcctatttctgcagtctctcccctgtcctcacctcccccttccttacctcttaagtgattcatccacctttctgagagctttcccaaaggccaccttacaataaattatttcttcctctgttggatccctactttgttgttacacatctattcattgagcgctctgtgcccgacactgtgctggtttcctaaaactcatccaagcctcttgctttctgcctggagtgaagagtagttcacgttctgattctcagtgcctctagggctggagcggaatcttaatgtctgtgtcctcgtctctcaccaccgcgttttgcactttgtcgaaaggtgtcagatggtgagatggcttctagactgggctctgcccactaattagctgtgtggccttgggagaatcatccggcctctcttgctgcccttctttccgatgaaataatgctgacgatgatatttcagggttgtccaggggtcaatgaggcgggatagagggaagcatcgtgaaatctgggagccccaggccagcgaaaaatgtggaagggccgtacccgcactctcctagcactgggtgtgaggcagcgtcgtttccccttcgcgctcttcgaatgtcaagtgcaccagcttccaatccctcctctgggcgggcccggtctggctaatctcagctgcagattccagtacaaactcaggactctcccccgcccagccgcccctacacaaggactcgccgaacacaccttgaatcccgcgccagagcgcagcccggaactgcagctcgcggcgcgggcccaggtcgggggtcgcgcgtctccagtcggtgactcaaggccgctcggtccgggggtgggtgtgggtcggcaggaccgaccagggccgcgcgggggcagctgccgggcgttcggtcacctagcggtgggagccgaggctggctttggccagtcgccattccgccgcgggcgtctgtctcgccgggttcccgggcgcgggaggaaggcccgcgccgcttcccactcggcgcgcttctctcccagtgcgcagtggcctggtgggtcagccggcggcggctggagcgcggggccggccctgcgcacgaatgaatgggcgcccgggggacgcgcgcgctcggggctgaagggcattaggaccgtgaggatcgctccgcgatcctgtctctccctatcacccccccgcccccccacctctctcctttttctgctctgcaggactgagcagctaggcgcgagcgaaaacaaacagctggggctgcgagcgcccccgccccggccccgagagcacgccggcccagtcccccacctggggcgcccgtctgcccaccatgaggaagatccgcgccaatgccatcgccatcctgaccgtagcctggatcctgggcactttctactacttatggcaggacaaccgagcccacgcagcatcctccggcggccggggcgcgcagagggcaggcaggaggtcggagcagctccgcgaggaccgcaccatcccgctcattgtgagtacgccccgagcgtcggccggccggctagggagccgcggcgcgcgtccagaccctgcgcggcggccgagggcgcggggcccggccagggctgagtgcccgctgcgccgggccggctttgtatatgttggagcattcctgcccgttgttatggcaacctctgccgggcggcggggctggggcgcaccgactaagggagggtgacagagggtgggggctgggagaaagtgctgcaagtttggtgggcccggcgtgcgcgcgcggctgggaacgtggcggctctcccggctctgcgctgccggggccgggagtctgggggctgcgggagcctcgtgtgccccggaaggctgccgggcccagcgcgcggcgagcgggcggtgggaaccactcgcagccgagcgcgtaggtggcagtgcgcagcccctctccagccttctgggggcagaggacatcgggtgggggcgtgggtaggggaaggctctctaggcgctgcgcctggcttcgaacccccttctgagccgggtcaacttgaacccgcttcttcggcgcggacacccagcttccccggagttctctgggttgaggagaggtctcgcactgtacgcgtctctcactcccaaccttagggtccgccaccacgggtaggtgggcagtgtcagcgcccgaacttggcgatacccttgcatgaagtcagcctcgcgacatctaagcgggcagggaaacaaaggcagtgtggcacagcgggggcggcggcggggctgcgggggcccttggcgctctggggacccgggcgggggcgtgcggagccgcagccgccctgcagggggcgatcctgtcgccgtctccgtccgagccccaggtgacagagctgtgcgtggccaggcaggggcacctgttgaggcgggaggctttggcacccgccgagagtgcgctcgagcgggcgcattcttccagacgggggcggttggtggacgagagcctcggacgaccctcgggaactaccagggcggggcagcctggccggatgaggaccaggaagaggagagccgagtggggcgggggtaaaggagtgaggaagcgtggcgattccgacaaggaaagatctgggcctgggggtggaggggtgaggagatccgcgggggaggtgcaaggtccggagggctgaggcttgtgtggagccgaatccgagaaacgcatccagacgcggatctgaaccccaggaatatcgggaagttcattggagagtgtcccctcatattcccatcctgccccagattccgagtcccctgcaaaggaaacattatttcagggctttgcctgaggagacctggggcgggggggtgaggttgtgggttttgtcctagataccagtctgggtgaactctctgggggcaagcctgattaggtgcactgttcccttctgggctgttctcccaggacactgtttccaaagcacttgtcgccctttggacagaaaactgataaggaaaagcctcctgtgctgaggccccagagtgttgtgatctgagcagagggacaggttggagctggaactgtccaaaccagcagtggcctccagaccccagggagcttcctctccaggagcccaggctgccacattcatactcagtggcaggaagagccctagtctcaggcaaggcaggctggccagatgctctgtccctctttctggtgaggcgatgagaagagggtctgagttggaaggggcggagaaagaggctgggcagggaggagaggagggaagagagcacaggagactgctgctcagagcctctgctttggaacccggaacctgaaccctgacctggcccatgcacctctctcctgctccttccagagtcctgtaagatgcactgggagggccgctcacatttctcaagagtcccagaatggtgtaggggacctgctggaaggattcagcactcattttgaggggtgggaattggaggtcatgagaatcaccagtaaacatcctcttgtccctgcttattcccacagggtttgacttgctgcaggtaagaaaaggtctcagagcgggaagctaagtttaaagtatgaaggagtatcagggagatacctgggagctgggaagtgaaggtgcaggaagaaagggagaatggaagtccctgggagtggcagagccttctgtggccacttaggggcacagccagctccctctttgttcttaagctttagatgcctgttccaccagcactgacccccccgtcaggcaccacttttgacaactgccttgcattgtttcattgtattcctctcttccagttatttcttccatgtgatttgcagctgaatgtaagtgatgcatgcgggaactgtgctggaagctccttgcatccccacattgatgcacacagcaagatttctttttttcttttttttttttttgagatggagtctcactctgtcacccaggctggagtgaggtggcatgatctcggctcactgtaacctccacctcccgggttcaagcgattctcatgcctcagcctctcgagcagctgggattacaggcatgcgccaccactctcagctaatttttgtatttttagtagagatggggtttcatcatgttgcccaggctggtctcaaactcctgacctcatgtgatccattcacctcagcctcctaaagtgcacagcaaggcttcttaaaggagtgaaataggattctcacccatttctgggggcagtcaatgcttcacatccccctaatattattgtattatattcatatctccttaatattttattatcaactgtaacctctaagtaaggag

SEQ ID NO: 448 - DNA, 8060 bp, Homo sapiens
agggcattggtagaagaggcagagatctgtgctagaaagagctctggagtgacagtgcagaacactcaggaccctgagtccttacctgctcctggacccccgtttctccatctgcaggggagagtttgggggtgggagtgcatggggcacaatgaagctgagggcctcagaggggatgcttggagaagctgaaaaatccacaagctgttctctgaaatttcctcccctggggcagcctcactacccaggacccactgtcctcattagcctgaggaaacctggtagttggagaaagctggggactgctaattcagaagaagaggtagaattctctagagcctcagtctatttccagcaggtgtgtggcccacacctggagtggggatactgaggccaggagtgggatgacccagcatgcttatctcctttgacagtatgtactggggtgggctctgtagacctctcctctacccagggagtgggagtgggtggggaaggaggcagaagccaggtgtagggatagactcaaagcgagcgatttctgtctccaacttcccaacatgcataactcacatttttgcaagctctgagcttttgtttctaaaatcctctgggtcttcactttaattaagttcttatgagtctaggattccgtttccaaaattctgtccacttctcaggaagcccattggaagcacagggttccttccatgttactcaccccttttcggtcctcagcctaaatccgattaatcagcctctccttggagtcagtctaaatggatgtgaagccacttcgtccaagtcccctcctttttatccatccctgttcataatccccaactcagaaggcattttccaggtcaggaatgggatcgattttcaacattgaggtttggggtgggccatagacaggccagcaccgtggagtcagtcccaaccttcagttttggaaaggtcaaagaagatacaattgggccctgcctcaagaaggctagtggggagaacgtggactccatgaataactcatcatagctgtgtcttctctgcagcactctggggaaggataaatggactcagagagaataggatggggatggtctagaaaagttttagggtgaggtgtgatcatatcacatacaaccagtcaggacttgctggctaatgaaagcctgggcatgcccatctctgctcccaagttcttagagttcagatgtcttagctctgggttaggacccaaccactcaccttacccccaaccccagggtaaagagatagggttatggggcatgtggagaatggaatggacgaaaggtgactcagccccagagaggtgttttcctcctaccaattgaaagggagatgctagggaagagaccaggtcctcctcttcttgctgcgtcacctccccagtccaacttcaggctgcccacgctccttgtctctacaaaaggactgcagaagccggaaagagtgacaactgctgacgtgcacgggatcctagtaactgctggtttctaggtgactaaacctggcagagagaatcatggaaccacaggctgacagagttaaagggcccttaagacagccctgaacctgactccatcttacaatggaggagctggagccccagcaaagggggtcacatggcatcagagacacagcaaagcccagcactcaggtctcctgactcccagaccacttctcacagcatcatattgataggagtaataagacgggagaggagaaagacacaagaccagcagccccagccagccagagtcctggctgagtcccatcatccaactctcaagccattggaaccctcttctcttgcccggctgtgggaggattcaggcaccctcatggcctctccccttatctcctctggccactgtttcagatgcggtgctctgggattccacgtgcccagagaagggaagggggctcatagaggactgagttgcagtgatcagtggtgagcacagccgtggctctccacccatgggccaccttctgacccccactatcccttgacatgagatttcgttccaagagactccaggcctgttttgctctgccagcagattcccacaaccattttgggcagcagcatgcttatctccctggacatatgcccagacagtgtaagtgacttgctcagggccacacagccagcaaaaaatagaacctaatgaaatagggttctccttgccacacccccaagctgaaactgtgcccagaagctggtccttctgtttacaagttcccattattaggacaacctgtaatctttttttcctccatgtctcagagttcatttttggatcatggcagagttaaaaaagtggagaggctatagacatgcctggctttctggccactagatctttgtggcggtctagggtgtatttgttgtgccccagtttgtctgcattttaaggcggaactggccctggctgggaacgaggaggtccaggagcagtaggaatgttgatcttaggtcttgggcctgcctccagcacccaccaaaagtcaccggatgtggaatattagactcatgtaaagcaggaagtttgcaccagagccaagaagagagcttgcagctgccagggaatggcctggcggaggaagcgcagcctcgcccagctcagcagacctgcttcatgacagaggcagctcttctgcactctactggggccacgccctgccagcatatatcactcccttcacctggtcaggcccaggtaccttgcctcaacagcaagttctccagaattgaggggaagagagggagtgaatttgcttctctaactccagccacctgtctctgccctctcctggtctataatgctactttgcattccatttgtttattgtctgcccacctctcaaaggatatcagggccacaaaggaccttaaagaccaccttatacaatggtttcaaggtttctcctttcccatcacgaccagcccacctgccaaattgtgtcaatgatgcaatgacatcctttcaagaatagtctcagaattttgttgtctgtgtcacgggcagagtaggctcataggccacatcctactagccagcagtgaccccaatcccctctctcccactgatcatgatcctatcaagccatcatggttgacctggttggagagttggttcagttcaaggttctcattttataaatgaggaaactcaggtccgaagaaaagaaagggccagtccaagaccacacagggagttaatggcaaagggacatggagcccaggtctcccagcccacagtccactgcactctgtccctccttgtcctggaggctgactgtgagcagcagctggggagggaggaaggcataagggtcatcaccagcctgctcagacccggaacattaacacatgcaggtactgttgcttttccctacctcaccacagccctttcccccatgcctggctctcagtcctgcttccctatttggtaacaacagcttcatctttcctgtcctgcagattgggagcctctgaatcaccatgtccatacggcctcttcctcctttctgttcagtttttccttcacactggcctagttcaggttctcatcctcaattgcctggattattccaacagccacccaaccagtctccatcagcccgtctaggaacccagtcatcagctttagggcagtctccctgagagcccagtaaatgttctgaaattgacatgtgatgtggaagtaattagcaaaataagtcattctccagggttccatagcactcacttattaagtgcttaatattaataagtgcttattaggtgcttaatattaataagtgctttttaagcacttaatattaagtacccgaaaagcacttattaagtgctttcataatcattatcttaaacaaggaattaggagacgtcagtgctagtccagttccaattctcggtgattactttgagaaagtcactctctctgttgggatctttcattcttttgaaaacggagatgtccaagttcctttccagctctaactgctccttttatggcctgtgttccagatggactgccatggtggcataagtggcaccatttacgagtacggagccctcaccattgatggggaggagtacatccccttcaagcagtatgctggcaaatacgtcctctttgtcaacgtggccagctactgaggcctgacgggccagtacattggtaagagcccacccttcctccctgctttatttggggctgtatggcatatttcaatcacaggagcttttctggtgcatgggggaaagggtgatggcaatcacgagagtccaagccccttttctcagctccactgtgttccgtggttttgtgaagatgattatataagcctgaggtctgattgcctttggacatgttctaggagattcctagttatccttcttcatctctgggcacctcaacaaccctaaaggcagagggatagagattaggtttgtgcttagagctccctttggctggagcatgagatggtaactgaagctccatcttgctgagaatatcttattttccctcagccccatctgctttggtgcttctcttggcagctctctggaaagcaggcaattgcctcgaggccccagagtgtatgcgtggtgtagcgggatgaaggagcaggctacacttctaatgcccattctaaaataaactttgaagatgatctagtttagccttcccctcttctcaatctacacatgggaaaccaagactcagagcgaagatacaacttaaacagggtcacaaagctattagcggtggaatggggcatttggcgcaggtttcatgatctcctgatatgcttactcctttctccctagctggggtagaatacagaggctaggggaacaggcaaccaaaggcaagcgacagcacccaggggaaaacgctttggggctgagcagtctactggcagggggtcagggaggcaagggcaatttgaccctccatgctctgcctggcaatcacaggcgaattcccggaagtgaaaggacggcggtcacgtggcccagtggctgtgagtgctttttctgggatgcttctctctagccttggaacagagcagagtgcgtttgggcaagagatgggctgggtgctgctgcaaaagagaccaggggacactgaggaaactggggagctgggccagggcctcatctgtgttcctgatttgccaaagattatgggagggttgtaacctcaccccaaagaagttctctgccttgtatccagggatggatagttcttgctccagaaaactcaatcctgagggttctgaatgagtgctctagctggcccaggtggagggccttggcaatgggcaggtgactgacagctgacttgaggaagggtattattcttgtcctccaaacctccaatccatccagattagagtcaagaggataggacctgagtcccagcattgctgtgaactcactggtgatcctgcgcaagtccctccctttctcgggcctcagtagttccagcggcacagcgggtgagccgggggagtggtgtggatgagacagggctcctcgccaggatactcccacatctgctctttctctttggcccagaactgaatgcactacaggaagagcttgcaccattcggtctggtcattctgggctttccctgcaaccaatttggaaaacaggaaccaggagagaactcagagatccttcctaccctcaagtgagtactcactcagcatcctgagaaagctcctctcacatggcccacatcttgttatcaaccccaaatcatggtggacatttatcggccaccaagaactactctcctcttctaggatccccagtggaatgagggaagggaagggacaagagagggagaaggacagggacaactggttgtgatgtgcatccgcagggagcaccaaggttgagggacactgaaaagggaccaggctagaaaggaagaccgtggactcacattatgcctatgcccactgcacattcactggctcctgctgcccactgcagaataaatccagactcccaacaccctctcccctgttctgtcccttcctctcatttctgagccctgtgcccacctccttgggacccacctaagaacatttctcaacaggtatgtccgaccaggtggaggctttgtccctaatttccagctctttgagaaaggggatgtcaatggagagaaagagcagaaattctacactttcctaaaggtaagtgagctgccacctgtgctggctggggctgcagcccctcctggctccagcccacagcgtcagggcccatgccacctcccctgctcctgggctcttggggaatttcttggcacctgactattgttccaactagagggctctgcagaccctgactagggtctcattggcccattttacagaaaggcccagaaggacccagagtgaacatactaagggtctcacaatcttctagagccacagctggcgctggcagtcttctaactcccaaactggggctcttttctcagggccaggctattccccaggaaggcctgggaaggaagagggtcagggggcctcaagcaaggttgacactcctcttatccctgctctagaactcctgtcctcccacctcggagctcctgggtacatctgaccgcctcttctgggaacccatgaaggttcacgacatccgctggaactttgagaagttcctggtggggccagatggtatacccatcatgcgctggcaccaccggaccacggtcagcaacgtcaagatggacatcctgtcctacatgaggcggcaggcagccctgggggtcaagaggaagtaactgaaggccgtctcatcccatgtccaccatgtaggggagggactttgttcaggaagaaatccgtgtctccaaccacactatctacccatcacagacccctttcctatcactcaaggccccagcctggcacaaatggatgcatacagttctgtgtactgccaggcatgtgggtgtgggtgcatgtgggtgtttacacacatgcctacaggtatgcgtgattgtgtgtgtgtgcatgggtgtacagccacgtgtctacctatgtgtctttctgggaatgtgtaccatctgtgtgcctgcagctgtgtagtgctggacagtgacaaccctttctctccagttctccactccaatgataatagttcacttacacctaaacccaaaggaaaaaccagctctaggtccaattgttctgctctaactgatacctcaaccttggggccagcatctcccactgcctccaaatattagtaactatgactgacgtccccagaagtttctgggtctaccacactccccaaccccccactcctacttcctgaagggccctcccaaggctacatccccaccccacagttctccctgagagagatcaacctccctgagatcaaccaaggcagatgtgacagcaagggccacggaccccatggcaggggtggcgtcttcatgagggaggggcccaaagcccttgtgggcggacctcccctgagcctgtctgaggggccagcccttagtgcattcaggctaaggcccctgggcagggatgccacccctgctccttcggaggacgtgccctcacccctcactggtccactggcttgagactcaccccgtctgcccagtaaaagcctttctgcagcagctgagcctactgtgtgtggtgcttcttcaatggtggccgcccccgcctgggtgggaagtgaggaggagaaggtggggcagggtaaaggggggaggatgagaaaagaacaaatatgacaacaaaaactttttacagtgggtgcaaaggtaattgcggttttcgccatatggcaaaatccaaggctacctccccaccccacaattctccctgagatcagccaaggcagactgcaagggccatgtagccctattaggggtggcatcttcatgagggaggcccccctgccacaaaaaaggggcaaaaattgcaattactttttcaacaacctgatagttagctgcagtggcgca

SEQ ID NO: 449 - DNA, 8060 bp, Homo sapiens
gagaaatgcatgaatggaagccctgaaggctgagtaggagttggctaggtgaagagatgtgaggcttgcaggaggagaggacagcgtgtgcaggggctccggggtgagaatgtgtgttatcgggggagacggaaacagcagcaaggaggagagtgatgggagatgagcccacggagatgggctgtgccagatcctacagggtcttacttgctgcaataagtttagcagggggtgctcttactttacaccattcttctttctctgaaaatcaggcacccctgccccgagtgggacccagaccaagaggaccactcaccaaggatgtagagttcaccatctggggacactgtggggagggaaatgagaatgcccttagcaattgagcttactcccccttgcccccccatcaaggacaaagatgagctggggggcccataggagaggattcataccacccagccccctgtggcaccttcttccagcgtaaaatcccgcgagactggcactatctggtccagagagacatcgtccccggtaatggccatcctccggtgcgtatagaggaagagactaagggcaggaagcagaggtgaggatgggggcccgctggctgtccctcagccctatcttggaggtctcggggtgctcacactcgctcgttggtccctaacactgtgctggtggtgccctggctaggcacactcctcatgccatctctgtctgtggtgcccatcagagactgcagttttatggatgaggtcatcaaaccagaacttttctcatctgcaggagcccctgattgttagtaaaacacaaacacatgtttgatctaaccatggtgcattctagcactgtgtgtgacaggaacagtgcaaccttagctacccacttctctccctgaacctgtttcccatctgtaaaactggggtgatggatcagaaaatgtctaaggccccctccctcccagctcctagaccctgagtcacttaccagctatgagacctttgacaactattactctctctctgcttctgtgtggtatgtgggtgttactagacaacatttatggagcactttcttttttttatttattatattttttaaattatttgaaatagagataggggtctcactatattgcccaggctggtcttgaactcaagcagtcctcccagctcagactcccaaagtgttgggattacaggcatgagccactgcacccagccttattgagcactttctacacaccccatggtgttcgttttttttttcttgtttttttttttatagagacagggtcttgctgtgttgcccaggctgcaatcgtagttcactgtaatctcaaactcctcggctcatgtgatcctcccgcctcagcctcctgagtagctgagactacaggcatgcaccacaacacccagctaattttcttattttttgtagagatggagccggggagcgggaggtggggcggggtagggggggcggtctcgctatgttgcccaagctggtctcgaactcctaggctcaagcaatcttcctgcctcagcctcccaaagtgttggaattacaagcatgagctactgcacctggcctaactcactttactctttaatatggacaaatcgaggagtaaaacaacttgctcaagatcatgtggttccaccaggtgcggtggctcatgcctaaaattccaacactttgggaggctgaagtgggagaatgacctgaggccaggagttccagcatgcagctatgagtgcactactgcactccagcctgggtgacagaaagagaccccgtctctaaaaaaaagatcatgtgaggctgggcacgctggctcatgcctgtaatcctagcactttgggaggccaaggcaggtggataacttgaggtcaggacttcaagaccagcctggccaacgtggtgaaaccctgtctttactaaaaatacagaaatgagccaggcatggtggcgggcacctctgtaataccagctcctcaagaggctgaagcacgagaattgcttggacctgggacgcagaggttgcagtgagccaagatcaccccactgcactccagcctgggcaaagaccaagactccttctcaaaacaaacaaacaatagatcatgtggcttgttagtaacaaagcctgggtttgaacccaggcatttggaccacgaggctcaagatctggactagtatgttaaactgtctcttctcaagaaacttcctccttagatcttgaggattatgagttagtacgtgtgcagggtttaaaatatagtgttcaaaaaatattaactatcattgtgataattattctaggagactcagaccctgccctggagggacagttgaagttcagctggagggtgcagtgatgaacaaccccatggcccagacaggtggggaccaagcccctcactcacgcgtgttcctggccgccgtgctccaggcggtagcgcacgagtcccaggaggcggctctgccggctgtccccctcacacagcacaccttgcaccgcctgcggctcagagtcaagggaagacaacccagaggcgaggcctctccccacccaggctgtcccaccttccctctgttcccctgcccccccagattcactgtgtggccttgggtgagcactcaaaccatgtgctgaactaacagacaaacaggctctctaagccttccttatctatgaaatgaggataataatccccaacttcatagggagttaggaggataactgcgtatttaaagcatttggctgagagtccaggactcagtaagtacttagtaaatactgatttccttctcccctgatggttcagaggggcaggagaggggatagacacctcgacaccttccattcctcttcccaaggccagggcaggctcagggccgcagttagcacaggaaggatatgatgacgcagtattccccctcagccagcgtctcctggattgccacagactggtccatgctggcccctgctgagcgcacacaccctgtgggaggggagataggagccccgctttggtcaacaagttacgcatggggtggtggagctgcctcagaggggttgggggcaggagggaggggcctttgcagagggagatggtaccggggaggcctgatcctcctcctcctcctctttgtcctccctagaataggcctttcagtttttagggataggggtccagtccctttgccccgctgggatctacagtttgctatactgcctttgtctgggagggcatccagttgctcttgagtgtggtctatccttgttggaagtggggtacgtggattggagaaggggacctagtccctttgctcctaggacatggctcttcctctcttttggggacagtttttgttctgctagcgcctctctgggaggtgtcagtggtgtgtccatgtggggttcagggaacatccccttactgtcattcaggagggtcccattcctctttccttggagacaggaagtgtcccattgctgcttgcccttcacccccgccccagcaggcccattgcatcagctgcaggccgggggttggggggtgtcccagccctcagcttgcccactccctcctgcccagccctgccctggctttcctgctctgctcccacccacagctccctgacattgtcacctacctcctgagctgtcaccacagggcgcacgggactccgctgccccaggttccgggacagtgactacatttcccaacagcccctgcgccacatggtggtcagtcagcctgcaagtcccagcatgcccgagtcaatcgtggggtggggagtctctccatccgtgttaaccccttaggccctggggtacactgggcttcctataccagaaaggttttctaatgattgccctcactcccatccccagccctctaggtcatggggccagagcttcccacccagaaggaagatggtcacattttatcttaggggaagaatataatgcatttttattttctccttagttccatcctcagctcttctcactccagggtagacaacccggacctctactgaaactcttcccctaaaataactaccttctcctggtttaatggagggagaaccagactatgaagaaccattatgtccattttccaggtggagaaactgagccttggataggttaagcagtttgacattaagtcctgcagctagcaggtggcaacactgggactccactgaaagtctgactgcaactcctgggccatttataccgctacacactgccctatttcctcccttagccccacccagccctcctgccacacagggctgtttgaggctactgggtgtgaacgcactttataaagggtatgacactgttcctgtccggcaacgtccttcccctgatccgcctggctttgtgaccttggccaagacctttcttcccttgggactcaatttccccatctaagataaggaggttacccaagatggacaaaaagagccagcacagggactgggcacagtggctcatgtctgtaatcccggcactttggaaggccaaggagggaggatcgcttgaggccaggagtttgagaccccatctctaaaaaaaaatttttttaaatttagccgggtatggtggtgcatgcctgtagtcccagctacttgggaggctgaggtgggaggattgcttgagcccaggagttcaaggctgcagtgagctgtgattgctcacccagctcagataaggaatgctaggatcattctcacttggcctattggctgtttaattaagctgtaagctcccgttggacaggactatgccttttcatcaacataccagcagtttctggcacacagttatctatggagttagtgaattactttctgaactattttaataaatacaccttctctcaagctttggcccaaactgaaggaatgggccttcagtgctggggagggggtgactgttgtgacttgtgaacagtttcccttcctctttccccaagtgaagtggccatcctaatgaccagttcaactttgcatatgtaaaccccttccagaaacagtcgttgccttcttctcaatccatttcttttcctggaaacatccacagcacaaatggagctcaagtttatttgaattcagtgtctaagtcatgtggacgatgaggggaaaggggattgactcagacccttaggatcaaggggtggggtcactgcagggaagcagaggaaccccaattccagccctgctctagtgtcaaagcctggcgaggagggtctgggcaaagtagatggggctgtgtgctttttatgatgaagaaactgtccctgcaggatttgggggtcctcccactgggtgggggtcaggcaggaggttttctgtttttccagacaaaccctatcctctccctgagattagggctgagggcctgcccccttggggggttccatggtcaggcctaggccctagaaggggagaagtgaggagccttaagcccagagctgtgggcttgataaaggccttttactaaagatgcaactacaggaatcagagctggagggggacctgaaggcttgtagatcctacagggtcttcttgactgctgctcccagattctgctgggcccagctaggggagcaggaataggagcagagcagagtggaggagaagtagcatagccacagccagggcccagtgcagggggtttctggtggccccaggagctgcctggttgaagtgaagtttcccatccagctgaaggcagctgcctgaggttgaggcttgacagcactcctggtagcagggtggggccacagccccatgacactgggaggtccctgcttcacaggcctggctgcagcctgcaatgtaacctgagctggagcatttcagctgcaagaagaggtgggaccattcatcttccccttgcccctcttccccactcaaaggcagaaagtgttaagtgggtcatgggttgagctcaacctccttggacccctagcttcctgcccacaagatcagtgagttcctagtgaacatacagggtggtcagaaaaaaaggggcacatcgtggaggtatggaaaattccagttgctgcctttggtgttggcatcatgcagagctgagggggtcaagcttgctagaccccacggctgctcccagcaggtctagctccagccagattctactgctgagctacccactccaggtagaaggagaaagccatgcagctctgagggaggagagctccctaattcttggagcatcgcagggctcacctcacagaagtccaagccctcagggcacatggccacagctttcggccctttgaaacagtcaccaccttggcaggagaaagtagcacagattttcttctggaagagaaagcaggaggaggtttgggagctctgtgcagactgaacaggtggtaaatgctggacagaggcaaggctggagccctatcatgcctgtgtcactggccccatccaccacacgctgtccattcctgcctccacttcctagaggaggcaggtgagaatgagacacatttccctggagggctggcaaggtggtggtcaccaggggtggaatggaatgtagcttgtcctctgggatcgtcgggtgggctaggcctaggagcagagcaggactgcctggggaagtgctgtgacacctctgtaaagccctgaccccctgccttgcccccagggagagcatgatgtgtgtgggcagctcacaacctgacatctcccccaccacggcctagatgagcacaggtgcttgccccaggcctctttgtagcttgttggggaggggagtgctggatgggctggactggggaatggtggggatgttaggagtggggaatctgagagggggtggggcaccaaaggtagaaagctcagacttggggagctaatgaggaaggcagagtttttttttttgttttttttttttgtggtgaggtggagtctctctctgtcgcccaggctggagtgcagtggtgagatcttggctcagtgcaagctccgcctcccaggttcatgccattctcctgcctcagcctacagagtagctgggactacaagcgcccagcaccaccatgcccggctaattttttgtatttttagtagagatggggtttcaccatgttagccaggatggtctcgatctcctgacctcatgatccacctgccttggcctgtctcgatctcctgacctcatgatccacccgccttggcctcccaaagtgctgggattacaggcatgagccaccatgcctggcctaggaagacattaaaggtaagggtcagggccgggcgccgtgactcatgcctgttatcccagcactttgggaggccgaggcgggtggatcacgaggtcaggagatcgagaccatcctggctaacatggtgaaaccccgtctctactaaaaaaatacaaaaaataagccaggcatggcggcgggcgcctgtagtcccagctactcgggaggctgaggcaggagaattgggtgagcccgggaggcggagcttgcagtgagccgagatcgcgccactgcataagcctgggtgacagagcaagactctgtctcaaaaaaacaaaagaaaaaaaggtaggggtcagtcagaaaaggcctagaggttagcatattcatagaggttgggggggctggtgaaaattgagctgagatttgagggcctctcaaagggctgggttcaaagttgagggttagtgtgcagaagggctctgagcttgtggatgagtaggaatgggagtcagaggtgggggctctgaggaatggggctgggagctgcaggttggcggggcagggctgagtattaagggtggggctgtctcaccccaggctgactcattgagcacgaaacagagtggccctccattgcagcactgcagcctgcaggggtctgggctgggggctgagctattggacagcagacaagggctaggaccggtttcatttcccccttcacagctgaagctgcaccaggccatgtagtgggaagcgttgagttgaatcagctgggtagagagaatgcag

SEQ ID NO: 450 - DNA, 8060 bp, Homo sapiens
ccaaagactcagtgccaagagatttatacatcctaaatttatatttgttagagcgaatatttaaattttttaaaagtgagggctggggagacacagaaaagactctcggattatcctgccatccactgagagccggatgagcacagctaaggagccgcaggagcctgcgctgctgtcgcagcctctgaattctcatgaattcccagccttttggaaagggggccgggtgaggctggaagagggatccggaggtaggagatgaggacccaggccgcgcaccccctccgagaacacctgcacctgtctgtagctgctccccctttgctcagccttccccacccaccctcctaaacaaaacccaaaaaccaccttagagtgagaagacgcccagccagggcgcagagagagcgctgggcgaagaggggtcgatggcccgcgggaacagggctggggttcctgtttggggaccggccggctgccaggcccctcgccctactgcttctccggagcgccgttgaccataggcccgtacaggccgccgccgtaggtcggctccttgtgcaccgccgcagcagcggcggccgagcggtcacgcatgagatcgctaaaggcgtagtccatgggtgggcggaagccgagcgtgggcaccaagccggcagtggagtagggcgccatgaaggccagaccgcggctgtgcgccgccgccgcggagtaggccaggcgcagggggctgaggccgagcggcgcgcccagcgggtaggcgcccgcgtcggcaccgaagtgactggcgttgggctgcagcggcgagaaggccgagcggctgctcagcgagcccagcgccccaggcgccatggcgccggccagcaagggtctgtggtgcggaggtgcggcgggccccgcctgcagcggcgcaggcagcccaggccccccggcggcggcggcggcggcggcggcggcgtcgacgcggctgggccacgcgtcgtctgcagctgctgcagcacccacggcggccttatctgggggcgccgcagggcccaggccggccgccaggcccccacggtggtggttcagcacctgctcgatggcctgcaccacgtcgccgccgcagccctgcaacaccagctccaggacgcctcgccggtggcctgggaacacgcgtgtcaagatatccagcggcgtccgctgccgtggacccgagcctccgcccagccctggcgccggcgcggcctcaccctcttctttgtcagcctctgaaccggattcagagcccagagggctagcggagcccgggctgtcctcctcgccgccgccgccagggccagcgctgcctgggcagctgccacctgcctctttggaggcccgagctaggggcgaaccagaaaaggactcgccatcgccgttctccgagcctgagccgggccgcacctctggggacgacgtcccgggccccgagtctgcgccgtcgggtgataagggcttcaccggcggcggcagcgggctgcccgggcggcctgcctgcagcagcgtcttaggaaacaggtcaaacttctgcaacttggcctctgggaggggagaaaacgtgtcgtgaggagcggttagctagaagacagcagtcacagcacctcggccctttggatctcagtttcctctccctcagccccacagcccttattcactaggctccagtgcccctctttctttttgctctagcattccttccgctctgagcccctacagccctgaccccagggctccctctctttctgtactcctcagaaccccaactacctgtgccctgtaaactcgatgttcagtgctgctttccccacgtctgtgccccaacacctccacccttaactgcccttccagtcctgccctgccgtggagaagtggccaggtccagggttcaaacaagagacaacataacttctgcctaaccacgctgtacagaagagcccactgtatagaaaatgcctgccctggcagtgcagcctgtaaggaaaggcgccttggttatctaggaggtcccaagcttctctacaggcagaagtacagcccctgtttctaatccaccctttccaaaattgagacctgagaagttcttccctcccaagtttagagcggatccctcctttccctcaacggctctggcctaatttcttccctccccacaaaaagccacgggggtccagaaaaagagggtggtgctaggcaggcagtaggaagcgaagaggaaaagacataggaaagcagacctgagaaaccagggagggtgcggaagaaactagaaggagggagggcgcagcaagcggttgtccagagggcgttaggaacgcgagaaggggaaaagaaactagggcgtctcagaacctagggcgtctcaaaacctagggtgtcagttaaagggggggggattccttaagggagttgggaaggagcagagggaaagggcctgtggagaagcgcagagcgaacgaagatgcgcaggtttccacctggggagaagacgaagcaaagaagcagggacctgcctgcgtttgggtagaggcgagtaaaaaaattaaagcgtgtacatttcggcccgatgcaggagaaaggggtaaagtgcaaatgctccagaagcgggagaaaggagagtttctgtacccacgctccatacccgaggctgggcgagcggtgaaccctagcagtcgcggcgactggacacgggggttctactctttctgaaccgagacaagcccctgggccccgtgccccagagctacgatcctgctgcccctacctgcggcctggccgcgctctcacctgagccccctgcgccagctgctccgcctccggtccccgcgggcgctcccgctccaggtccccccgccgtcggcggcgcacactgaaccgaagacctcgtaggcgggcctcggggggatgatgccgttggcggcggccagcgccagcccctcggcagtgccgtagagcagctgcagctcgcgcgcctcgttctcctcctgcgcctgctgcctgcgcagcgccacctgcgccgccatgacacgctggcgctccgcgatgagcgtgcacttggcgcacaggcagtccttccagcgacagtagcgtttgtggcccttgagggccgacaccacgccatggttgcgacagcgcgcgcacttgggggtccgcgggtacttctcggctgcccgcagcaacagtggcggcccccgcagcaagccgcctgccacgctcaccggtagcgatgcagcggccgccgcggctgccgccaccgacgccaccgacgccacaggcggccccgtcgctgttgccgccgccgccgtcgccgcgccgggcacgctgggcagctccgagcgcagctccatgacaggacctgacgggaaagaaggtgggagaggggagagacctggtgaggagcacaccgcgcgctaggccaaagcgccgccttgaggaacccaagctggagagggaaatttgggccgcggaggctgggctagaggggccagaattgctgggaggaggtgcagtcggaacctccttgtgagccctagcaccttcaccccagtctggccatggctgctcttagacctgatatacacgctaggggtaagattttgtctgaattagtgattccgctggaaaaaataaagagacatgtaaagtgtgaaagtcactgattcagatggctgtaatgagaatttggaaaagttaagatgataccccaaagcttagcctaattggggtgagacgggtgagagaaatgctcgtttgacgggactgggattagagcgacagttttggcccagaagttaggctgatgccaagggcaaaacaggaaaacccggagcaaaacggtcagtttggtggaagggtgaagaggagagagatgtgaaggcgcagatgtgaaggccggttgggccggagttttgtttctttttgtttgtttatttttaatgcagtttggggcagaagctttggagagaaaaatcaacaacagaaagaatagctttaggaagcagagtgaggacgaggaaacaacttgggcaaagttaggcccagtggctctgggacccgtaaaaatgtgagcgccaaaagttccacggtgagggcctccagagagtgagagacaaaatgtatgtggaatttagcttaggactgggaagtattaaagagaaaaattcggccaaagaaactttctgtataggcaaacccagcccaaagatgagcttcatgggcaaggaaaacagtgaaaagcagctgatctgggtgtccgggatccaggggccgcgcctgggagaggggaatgtgtaagaaaaaaccccacaggcaaatgctgggggaggggattgggtaaaacctgtggtgcagttttttagcttcgcagtctggagtagtagtcggggcggaagacgtatcctgcgaaaagttaggcatttcgggagggggatctttctcgaagaccacctcacactgccctcccctcccctccgggtttagggacagagtcgtcagacacgccctccccgtcttggggtcccaggggacccctctcgagcgcaggctcctgcgttctgatctcagagttggggtcctaggacacggatggcccagcaggccgcaccaagccaggggagtcgccttcgcaactggccataaacggacaccagagtccctcccacgccgcagccccataaggcccaagcaggcccagctccccgcttctgccgcggtctcctctgcttcccgcgttccccgtccctgccagagcccgcgacagagtccttgtgtctccgtccgagagtcccagacctcctctctatgagcgttgcctcctctcccagacccttcgggcgtccctaaggcccacggggcccaggcctcctcaacaggggccgcagaccaggtctccacccactgctctccctgcggccctcaactacctgccttgggctccgggatcctcctcctccgctggcgctgcacgcgcctcccggctccactggcgacgctggagctcttggccgcttccctttgcccccggccccttatctgaccacgtcaccctccttcagtcaccatgtccgaacttccggacccctcagaacgcagcgcagtccaaccctcccttcagaaatccgggtcggaggctcgtctgcgggccgcgtggttggaacccgcgacctgactctcgccgtgccgggtcccctcgcggtgcgcgccggacgctgcgcgcagccggggcccagttgcccggcgctgccagactctcaatgagccgctcgcccgctctattgttggtccttagggctccattagacagaattggacaacaatgtggcgcctgccattggccaggggaggcagacggcgctctgattggccgggcccgcgcccggggagccccgcattctgcagtgtccgaaagattcgaaactccaaaagctccactgcgtgcctctgggaggggagggggcgcgccaggaaaggagtggaaaaaagtgggcgaggaggagcgttgaaaatttcctgacaagtagtttccgtgcgcccgagagcgtgtgaattgctcctaattaccgtgtccggtgcgcctctctgcgtagacttgtgtaacctctcggcttctggggcgccggctcggctgcaccgctcttactggcctggggcgcttggcaaagccgagcttcccaagtggctctggagccctgaggcgggatggggggcaggtgacaattcaattactgcggtcggggtaggggcgggacaagggtgcgggggtggggaagggagggtgttcaaggcataaatgccaggacgatttttcctgccttcttcctgctatgtttcggcgcgctcccaaatccgacgagtttggggtagttgggggctgctttggttttttcctcctgtctccttaaagctcagttactttattttaaaagtcctgatacgatagtcatcctggagggtaagtgtggtttatgaagattttcgtgtttaaagagaagctcagcgaagagaaatgagattgcacttcctgtcggtgcccgccacgtccctcgcgccctgagcctttcctctccccgcccctcttttcgcgtccctcagccccttttgagctctcttttcctcacttttcagcatctcgatttcttttccgtggtggtgggattctttttgtcgttattgcaaatgaacaaatagcccccccccctttttttttcttttctaaacgaaagtaaaaagtggcctctgtgtctccgcagattctcttaaactcaggacgcgcatcggtctgtccgaccttcccggcaagagacaaagtcactgctgggaggccccctcggacagttttcagttttaactttcgccttattctcgtcttgtcttgatgtcacggccctgaggaacagctcgttctgcagaagaggtaacaggtttcagattttgtttcctttttgaaaggctgttgcctttcaaacatctggaattaatgccgcggccctcgggcgagtcgccctcggtttctgtagctctgattttatctctgtgtcttttcccctctaatttctaaagttctgtttttccctctaattctgtttttccctctaatttctaatgttctgtcactctcgtttttgttctctacttttctctctctccttcagaataaagaaaattcgtttaaataatgaggaaaatgagcgttcctgtcgttctccctccactcttgaccgtgcgtctctgcgttgctctttcgaacctccaggccggcgggaatctgggcgcgcagactcggcccgggtcgtcgcggcctcaggacgcagcccattccgcctggcacgactactgggccgcgtcttgtcagtctatcagcttctgagcccaggaatgggggtgggggaaggacggtgcgactaacgggcccccacccgaagaccgcagaacctggcgccccggaagagccctggaagatgcccaccgggaggctgaggctggagggaggagtgggtgggggtgattcgctggaggaccgggcggagagcttccagaaagttcaccaggccccggcgcgagggcgctccgacacggacaaggtctatgatagcgataaaaagctggttactcgctcccagaaaatgccacttgctggagtctgtgaatgggtttaggagagagaagggtgtcagcccccgcgagggtctcccgcgtgaagtgaggataagggagtgcttcagggataatatgtcctctaggagcgcaggacccagaccccaccttccaacacctggaggttccgaggccaagtatgtctagccccggctgcacctgggtaggtgagccatggggtcgggggaagagcgccgacaaccgccggattccgcgcaggggccgccaggcgcctgctcccagagctcctttggacaaagttttcgggaaattctattaaaccgaaaacgaaataaactatacaaatctgcctagcttttgagggggcggtggcccaggtatccttctcgcttgaggccaggtcaccgtgagatttccccactccggaccggggatcccgcagaagccaagggtgtagccacgaggactcgggaacccgaggcggcccagcagatgcgtgaggaacttcattttctcaggagtgggaggaggagcatcctggcatctaacacagcccaaccagagggaatccgcccaacccctagtggcggcatctcactcttctctcgctcctcttttctggcattcacatccccacaggtctgagacccacagccttttctcccactccccggaggttagggtgttcatgtgagtgaatgtgttatggagggaggcaaaataaacccgttatggagggagggcaaataaacccaaggtcatctcacccacacttcgacagggcaggatatcctctgcccagcttcccaggccgctccagggccagttcctcctgatttggattgggttggtcggaggggaaagcaagggcatggcccaactgagccaccagcactagtagagcacgcccaggttgaggcagcagggtc

SEQ ID NO: 451 - DNA, 8060 bp, Homo sapiens
gtgggggataatggtgctgttatcctcacaaatcgactggtgaacataatatccatttctggtctaaaccaggaataaaaatgccaggtaggacaagagcaagggtacctggagtgagcaaggaaatcaagagggctcctctcccgtcatctacctgaacacagtctagacacagccacagcctgggacaattctggccccaagtgaccccatgacaagaggctgctcagggacccgggtgattaatatgacgggacaaccacccgctttgtagacttttcttgaggcttctttctggggttcagatggaggctgttgagtcatcacagcggatgctcaaaagaaaagaaaatcaagaagcccatccccagggccctcctgctaaatgaatggcagccccaccctgctcctcacccacttccctcccctctgctcccctcaacctcctgcgtttacctcccggtactcacccaaatctacaagctctgcaaagccagctgcagatatcacaggtgattttgagctgtaagaaatcatgaagcaaaggcatttgctgagaggccactctgcaaagtgcagtgctggattgaaagggtggggagtgagaccaaggagaggggaagggaaggggagaagcattgatttaaaagctgagtgtggaatgtaccaggtttgttacctgtgctagctcatttgatcttcatcaaatgccctgcgattgaggtgttgttatcccagtttttagataacaaagccaagcatcagagagcttaagcaacttatcaggggccacacagctgtcaagtagcagagccagaaggaaaatccaggtgagtctgggtttccacttcaacgacaagttagggagaggagctgagagtgagcgtcgagagctgtcagagcgggcattgaagaccgtggtgaggagttggaggctggttgtaaagtcatgggaaactatatccaggcatcacccagatgagcagggaggaggaatggatctgaggggcactgtagagaagggacttgggggatggattgtctttggtgtataaaaggaagaaggtgtcaaagaggatccaaggcagcagctctacatccttgttgagtccagaacccctgtgtgacgtgcaactgagaacgcgggatgcttcccccagaaaatgcacacaacccactcacaaacatcagcgtcattttgggggagttgcttggttcaagattaaggtttctcgccctgtgaagggcctgaagtggtgagaacatcggcatcctgcgtttggcttataggactctcaagacaattgtatatttattttcagaaaagaaaggaaatatctctgaaacttgaaattaaaaaccttatttattttaatataagagaggagtttccttgtttccgtgtttcttctgcaaatctgattagtaggaccgccacagatgccactaagggtcacttcacaaatcaccctattcttctatgcttacagatacctatttgcaaaaaggctacaagtcctagtaactggatgaaagacatttggggacaaaggtcaaaaacgaggggaggttgggcacggtggttcacacttgtaatcccagaactttgggaggctgaggcgggcggatcgcctgaggtcaggagtttgagaccagccaggccaacatgatgaaaccctgtctttactaaaaatacaaaaattagccaggcgtgatggtgtctacctgtaatcccaggtactggggagattgaggcaagagaatcacttgaacccagtaggcggaggttgcagtaagccgagatcacaccactgcactccagcctggacaacacagcgagactccctctcaaaacaaaacaaaacaaaaaaaagggtaacagggtggatccaaagttgctctggaaagtcaagtctcgaatgccccaggaacgtgaagccttcatagagccagcgaagggggtctgcgtccaggatgtggagcgggtttgcaaatctgggaagctacacaagaaaatgccactgatacacacgagacagaaagagaatgggtagaggctgattgggaagaggaatgtgcctggatgtccctggtggcaagtctcattctacctttcccatggagaaagagggaaagacgaaggagagtgaggaaagacctgggagaggaagccccgcggtcgtttatcatctatggggtggagaaatcagaagtccccacagccaactataaacccgcattgcatccctcaccccagtgctgatactacctaggcaagcttggggcagtgcgctggtgggagaggaggccaggcacccaccacaatccccccagggagtaaaactcgggatggggagggtgactgcatccaggaaggaccgtctcagcccaacctcaccatcgcgtccgtgcgtgtctgctggaaaccggtctctcccaaggttgcctaattttctgcctaaaatataggctgacctgcagcttactccttcgatatgctgtctggtgcgggggggggttgggctgctggggcttaaggagagagtttggtggagataaaaaaagtaataataataagcctgatccaccattctggacaccctttccagctctctgctccatgaagctgtgtgtgtgtaagaaaaacagggtgtgtgagtgtgtgtgtgcgcgcacaccagcaatcagtgtggcgaggccagaggctttcatcactgaaacactgagttcctgtttataaacatttgctcactgttttgttatgtgggggaattaaccacaaaacatgacccacgacgtcaagccctccatcttcacatccttcataccgcatgcactttctctctctacctgaaagccgctgagtagaaaataatttctctgcaacaaagcggggaatgcccagagaagagaaggcgcctctacacagacttgaaggcttgaagggaggctggggagacctcccaccggcgatcactgacccatggggctgtctctgggaaaagtcatcacatgggccatggctgaaggcattactctttctggggctttttggagccccaaaagatattgggaccaaaacaaatgtatctcaatggcatttgcgcgccatactgggcagggggtgaaggtctagtctgtatgaagaggagaggaagaccaagcagaacagaatgcagctgagaccttgggatagaatggaagaggggatggatccgctgagaagctttggggctcccaggttgggaggacttatgcagactgaaaggagacctcaggagcagagttctgaggggaggcactggctgttgagtttgttttcctgaccatcctccagataagatggttctttctggtgaaagactgagcatgctgctattatagtttgggggcatcccaacagcaggatgcaagtgttctgcgaaccatattccacagagtgctggggctccaaagttaccctggagagcccgtggcaggggtggggtgagtcttgccctctgagagccctgccctgccttcaagaagagcagttcctcttccatctgcttgaggcattggagctcctcactggatttcatggtaagaattcaatcaccaggaaaagtttggaagcctctggatcaacgatatccaaagtctctgatctcagcttggaggtgctttgagcctctggccccggtgctctgcactgtcccagagaaaggggtgggccacttttggtcctaacaagcagttcaccaagaacagggcaacggctaaaagatgaagggtgtccagacgccgatgagggatcccaggccctggagaaagacggttacaggataccaagattcctggtggttttccagggcattccagtattagagccctcaccctccttcccgaggttctgcgctgatccagtgcagaagctgcatgcactggagaaatggctaactctgtgcccagggctggacggagcagcatcgcagatcaaaaggccgccacccccaagaagtccatgaaaggcaatcacccctcaaagcaaacgctcttctttccaggactcacagagattatcaagtcccagctcttgcaccccccaacatgccctttcccttcctgcctcattactctgttgaagttccattcctgttccacaaccacccagatctctcccgtgcctctgccttccttcccaatgagaagcagggggaatgctgggtgcccattctttaaaacaaacaggaagtgggggagggggagctgggaggattgagggggaagggagagaatggcattcaaggactggagcttgacattctaatgctttgggcaggaagggaggaggccaccatgctttactaggtcatggagaggcggagcaggcctttgagcacacgctcaggccagggcaccacagtgcaggttgctcagaggctccccgggcctagagcacgggcatcagtttcacccactctgggcatttgctgccaactcgggaatacccttcacttttccattacttctgcatggcaaatatatgtatagatattatcgtgtgtgtatgtgtgtgtgtgtgtgtgtgtgtgtacaatcaaaacttatcctctgtagcgaaaaaaaaaagtattaattatgttttggattgtcttcatagagatctgagagcataatttaagtaaatactgtagtcatgactagcaatgctatattattcttatttgaattttaaccctaagaattttccagtctgctagccaaaccaacacttgggcacatttatagttctcaaaagctaaactcatcccagtgttctcctgactactatgagaggtttggagttctggagttcggacatgacacggtttccctgcatgtgtgatgagacgtgtgtggatgtgtcagaagatcggcctttgggtcaatgcgtattttgggtgctgcttgcttcttgctcctttgggtgtgcccaagtcccatggcctctttcaagagttctgagcaaacccattcctgttcccctgtctcatggttcgccagacattactggggcaggagaagggctgtcagctggggcagtcagcaagagtgactctctgattgccctggctaggagccccttcctgatacccaggtaagagcaaactgttccttgaactgtgcacacagggcatggaaaccctgcttgtcaatggattgaaatgaaaatcccaaattctacactttctgtgacaaacaagccactgggcttcctttgacttcttcgttgttgtggactatgattcataacagtttagtatgttatgcaactagataatcataactatatgtgtgtaatatagcatactctatatgtatgtagtatagcatactctatatgtatgtagtatagcatactacatatgtatgtagtatagcatgaacacacacacacacaaaatgttaggatggtgtgttccaacacaaaggcatgcacactcacaaccacacagcaacaacccctctaagcgttccacagccaccagtgtctcaatcagcctcgggccgccctatcgcctcctcgcctcccgaagtctgttccatgcactcgtaattgtatcgtctgcattatcgggcacattcctttttttttttttaaggttactgaagtgaactaatttatttggtctggtcattttagcaccaacaattatagaagaatcggccaattatttttatttttatttattttattgtttttttattatactttaagttctagggtacatgtgcacaacgtgcaggtttgttacatatgtgtacatgtgctatgttggtgtgctgcacccattaactcgtcatttacattaggtatatctcctaatgctatccctcccccgaccccacaacaggccccggtgtgtgatgttccccaccctgtgtccaggtgttctcattgttcgattcccacctatgagtgagaacatgtggtgcttggttttttgtccttgtgatagtttgctgagaatgatggtttccagcttcatccatgtccctacaaagggcatgaactcatccttttttatggctgcatagtattccatggtgtctatgtgccacattttcttaacccagtctatcactgatggacatttgggttggttccaagtctttgctattgtatcgggcacattcttgccagcaaagaatttccattttgactaggtgtcaatggaaacagcatcttctccttaccattttatacatctgataactgaaaaactctccgaagactagactctggcaccacacattgtaaatcctgtttccactttcctatcagcctggctctggggacacgggccacaggacatgtttatgctgggatatgacctcaggccctgtcctccctgtggaaatgccacaagagccagcacagggggctgaaggttgtccctgcaagccacttctacatcagaacagctggcgatagcttcatacaggctgaagagactgcaaattgcatcaatgttccaccaaattcaaaataaatatctccccgacttaattttcacttagccagatcccaaaaatgtccaaagccacttcaatatgacaagaaactgatgaggtgtgtggaggcaaagttgaggtgaaaagagacaaaagtctttttttttttttttttttttgagatggagtcttgctctgtcacccaggctggagtgcagtggcgtgatctcggctcactgcaaactccacctcccgggttcaagtgattctcctgcctcagcctcctgagtagctggaatcacaggtgtgcactaccatgcctggccaatttttgtatttttagtagagatggggttttaccatgttggccagactggtcttgaactcctggcctcaagcaatccacccacttgccctcccaaagtgctgggattataggcacaagccactgcgcccagccaaaagtcttaatctatttatgttatttttgctaattgtacaaaacacatggtcttgggaactgactgctatggtacctccaggcccatgcaagagatgaacctgaaatggaaggaccctgaagcttaaaactcattagcttcatactaagtccacctctgcataggatttggcaactagtggtccaaggggtaagggaaacaaagtcttccagctgcaaggaaaatcctacacaaaggtgcagaggccagagagctcaggactgttcagcaagcagggagaacagtcataggtgagaagcacgcagtggatgtagatctgaaatactcggcaactgcagaccacagagggttgcaaaatgtcagggtaagatatcttaatgtcaactgtacagcaagaagcttcgaagatttgccctcccgtggcctaaggcaaggactacccctctccaagccctgctttagaaaaagaaatctgggatggacagatgggaggcagagagaccagctcagaggcatcagcagctatctgccgcaaatcaggattctctgggaaaggaacaacacagtgattaacagaaacacacaaagactcatgcgcgagccttgaggcagtgcccaactcttcttcctcccctgatcccattcacacttggatgtggcatagcccttttctctgatacctggctgctgtgatgtgtcctcagcccagctttacctgtggggtcacagtctctggaactacgctccacacccgtcactgtcctaccagggtggtgactctcagtcacactgtccaggatgcacctgacacctgtggatgtggtttctgcctgtcctcttagtccaggatgcaagaggaggcggtggcttagttcaggcaggaagaaagagagcctccacagggctgtagccttgggaaccggatggagggaccaagtggagagaaggtcaattaggcaactaagtgtatgcagaaggcaaagaagacggacacatcaaagaggacgctgatggccacagtggaaggaagaatgtctgtgtgtttaggctccaggagaagcccagcgctgcagaaattgacgcatctcagcatgggtgtgctcagttggaggctgcgcacat

SEQ ID NO: 452 - DNA, 8060 bp, Homo sapiens
gggggttagaggatgaccctctaggttagcagtggggagggaaggcaaatggggctgggaaaagggctagaattatcctgggctgagaggagtaggatgaggacactgaatgatcaaacccttatctttgcatgtccattatttagaatcatcaccactggccgtggggggatgacagaggtgaacactgcccctctctatgcccagaaaagtggggggtactggctatggtaagatgggctgtttaagcctgaggggggaactctttccaaagaagaaacaggatgcaaagaatgggggtatgtgggggtagggcatcattttcccaggagaattcagtggcatctgtttttggtgacattgcaaggtccccgcagtaccagtcctttgtgtatgtgtgtaagtgtgcacatggatgagccgcacagacattaactgtgagtcgtctctggtcattcctgatacacatgggctggggaccatctgcttcatgtatatggggtgggggccatccttcaactagaagactcctctacttctttccatcctggaggggcagggtgtggtggtggtagtaggaaagagacaaggagggtggagtggcgatcagtgggttgagataacatcagagtggggagcccaagaaagagactgcaagtatgacagagggcagcagggctgtctggtcttggacacatcacttccttgacctattcctttgctttggacaaggtttctaagcattcagagtccttgggaatcgtgatacccttacagcaggaaggaggaaagtcagacttcctgaggtacctcccaggcacctgaactagtgggaaataagtagatggtctcttttccttttctcatacctatcccaaatcctagctctcaggagcatgtgataacttcgcctcggatttctttccaaagcagtcatgccaaggatctggaagctgtgggcacccctccaccgcctgccactctgtgctctataactcagagcttccaactccttttgccctcccatgttggtctgggttaggagcacctgccaagcctggagctttttgcctaacacagcaggaggggctgaggttaggccacaggaagaatttcaggcctaagagacacaaattctgaagattagtgaaagtaggcccaagtcccggctctcttttttccctctgactcctcaggattgccttgtgcccctcccttgtctcctagatccctgaaccagctggccttcctcctcctcctccctacccacctactacacctgcctcctccaacacccaacagatacaggtgtcgggccctgtctgtgccagtgggaggcagttctccttggaactgcatccccaacctccacagtccagactcttgagccctttttcctgggtctgaggttatcctggctgatgccctgcctccaggcatagcagcctttcccctgactcccagggaacacaacccatgctgatggctctccatcctcctcatcctctacagatttgtgaggcttcaccaagagccttcccgtagtcacaccttagagctctgaggtggtggctcaccccaggccagagagaggacggagacgcaggtacctaaccctatctccacattgggaagctgaagtggtagggagagtgtgtacccctgcccgcttcccttcacatcagaccttattctaccaaacagctggagcaacaaaaatgacaaaaaacactctctccacctcatcccaagaggtcacaaagtttttttcaggttgggggtggccagccagagcctggcagcttgttgagagaaacagagaactgaccttgtgggaaattgatattctttaggaatgggaatgtctaggcaaatggacagagattacaaagagatggagcaataggcaaataagcaaatatttggcaaacaaggagtagtaaggaccacgggtggccaccctctccacacatacgctcactctcaccgaggcatacacttgctcacacactctcatacactgccccctctgccaggctgctctgagctaaaaatagaccaggctaggaggctgggccagggccctggactcccaccccttgagccaaggctgtcacagtgcttctcccttgcatattgttcagcttggaccccagcccctggaaagactccacctctggcctcccagtgctgctggctcagtcccacctggactccccactccaaagggcaggagttgggaataagggccatgtgcggagacttgaagaagggagcctcagcctacaactcgaccacccctctcccctctccctggagccccagccctctcagtggtcctcagtcccttcctgttatcactttcggagcccagcaaggtggcccccagttaggaggggacagggagagctgtttctcctcttccaactcccacccttccaggctccctctccattaccgacccctccccaggcccctcccgcactgctgctgattcccttcagcgccaccaccaagctcagaaactctagtgggggttgactgggtgggggatgcagggttgtttaaggagggaggggtcgtgtcctcaagcaggccccctcccccaggactggggaggaagagagcgactctcgcggggccaggcatcgagtggaggcgctcttccttcggtcagtctcaaagaagcacagattcgagatgtggctccgacggtgggggaggggacagaagacccccccccgccccccgcaaactgagcgttcgtcctcaaaagggcgcactgctaagggaggactaggcagggatcctgggtcccaccagtccaggggtccctcgtccttggctgggcgagtgccctgccgccccgccctgctccgcacctgctccgccgcctcggggtcaaggtgcggctccagcagcgggaccgtgaactggatctttcgggggctgttgtcttgctccatggctggggcggcggccggtgggcccgcgctgcggcgggagggaaggcggcgggactcggggctggggcgggcgcgctccctctccgctccgctccggccccggccccagcccggcgcgctcggctcccggctcccggcacagcgctcccagctcgcggctccggggactctgccgccgccgattggctccgcacccgcccctcccggccccctccccctcccccagcccggaaccttaaccccgtcgtggctgcaccggcggctgcgggggtcaccgccccgcgggccgccgagtccgggcgtggcccgggagccgtcgtagtggacagctcaggcagatacctcagtgtcctcggagttttgggcagggcgttggggtggggagtggctaggaagaacttctcctagccggagcaggttgttggggctaggaaagtagaggggcgctgcaggagaggagactaaacgcgagaggaagattgcatttatgattttaaagggggttgtattatagagaaaagatggaaaggggatttaggcatgcagcaggagggattaaggttagacttcgagagggactttcctttgcaaggaaaacactaggcggaggtaaaaacttggagggaaatacgaagtctgcacacccgtcctgtgttccctcagtgccagggagaggaaactgaagacttcagagggtctccggagggcgcgtttctctcgaagtgcctgtgggagtgggtggagggcttggggagagaggaccatctgggactcgacaaaaggaataacgatggtggggagccaatcctgcttgtgaaatcgagttctctttctgcttgctaaattaggggatggtaaagtaggtgaaaggcctgcaaggggaaaatgcctggggagggagagagaaactcctttggtggggtggcttgtttacagatagggttggtttctaatttcactattggcaggatactgaaaacgagctgctgtaactgaaggaatggaggttagactatgggaagaactgactagtttggtggaagactaagatgccagtcaatacgagccagtgagggagacaggatattcacaggagctggtgtgctcggtctaaggactggggatcactagatgggggaggggatgtgctgggcactggggaggggtagggctggatgcatcttttcgggaggagaaggtggagagaagaactggggatggggaggagggcacagggagtcctggaagaggggaaggggtctgtctctttagccttaaaccaagcaactggcaagtgccatacagattcatgcctggttcttggagaaccatatggtcatcttctcctctaaggtgtcagcctcaactctcagttgcctcctctcctgggcagccctttccagaccttgatttcacaaggccccttcccctctaacctcacaaaataacttgtcctgccttccccccagccatatctttttacacatgtcgggctcagttttctcagggtaaggctggggttatggggacccagtgggccagctggacctctgtctgcaggttaactggcccctgttttgctgtcacctggactccaggattgactcctgacacccagcctgcacttgcagggcccctttgctctctggtgtggcagggccaggtggaaaacagctggttgggcttccccgtctccattcccaacctttgcgcagatccccccacaagaagtgacagtggagaaagagatcgtgaaggccctgaagcagagaggataacggttgggggctagggagatacctggctcattagggcccagttgcttgctctggcctccttcctactcaccccacctcctaaccacacatccacagagcaggatcccaaatatcctctaaataggtgacttgtctattccccatcccattctaccaggaccatgggatgtgaagccaggattcccacatccctatgtctggggactcaggcttctctcatgagcctccatctcatttgtaaaacagacagaggatcccacctcctagggttgagtatcatcttgggtagagtacctggtgcatagaaggtcacggttaattgtagctgctggttttattgttatttcctggcaggacggcagagttgaggggtggtcacctctcagagtggttacctctccacccccaccccagacatccaggctgcctagtcctctttcgtattccgtgctctccctcaaactttggtctggtcatggaaattcctccccaagtctctcacccaccctatgttgccttctcaagtcccggattctcagagtcctttgtcctgaaagccacgggtaaggagagagaccaagagagcttgagctctggagagatggctgatgaggggctgcgtgggaagaggggtcccggcagcagctggtgctggggtagaggcagcggaggagagaggagggagagggaagagggatggctcccagtactggctttgggaggaggagactggggaaagtgggcgaagcgtttatggttagcagggaggtggagtgtggctgggtgcagcctttggtgccgggtaagctggaatgggtctgtctgtgaaggtgtgtgtttattgtcattttgacttttatttatgtccatagctatgtgagtgcctgttgggccggtgggtgtatgaaggtatgggttgctcacacacaggcctggggcactgcaaagggcctgatgcctgctcttggaacctttcctagagtgagtaagagttagagcctgcctcatcccaactccttccctcagcttgcatgtttctatgttaggcgcctgtgttcacagccctgctgcagtcacagcctgggctggaggagcagcagctgtatgtggtgcactgctggctccatgaaatatttaaagttacagggatgtgactgggtgatgcagtcacttaatgactctcaccctcccctattttcggcactggactctgggttaatggggctgctctttgtcgctgtcagcactttctgtttttatctatccacccttctcacccctactaaccctcacaaccacccaggagggaggacaggtattagggtgtttattttgcttctcgaggggagggtagtgtagagaggtgttgctaagatgggccacctgggccaggatatgaaaggtcagggttcaattcctccatctgctatcaactctctgggtgactctggggttgctcccccaacccccaaccggactcagtttcctaatcttcaaaatgaaggggaccgggtgactttgcaggtttcttctgctctaatattctgttattctgagttgagggtgctcctgtcacacagccagcatgtctcagaaacagggttagaacccaggagccccaggaccttatctgtatctttgcctttctccctgcctgggcagtgtggcagaggcacactccggcttgttgacaacatgatgcacacacactttttatacacacagctctgaggagataagggcagagactgctgttatgcacccaaaggagcagcgaccccatccaagtggtcccccaggaagccatatgctcatgccaacgtgctgcagtttctcaaacatttctggaaactcttggaatcatctcagagcttgaggcatatgctctgaaaatccccatggggggtgaatcattgtcttttagggtggctttgctcctttggaaatgaccaatagcctttaggagccaacccttgtgaagacagagggaggccaggtggggagtaagccttcatctggaaaagagatgtaggtgcccggcagtgagactgtttgtcctgcggggttttgagcccatctagaagacttccctgcaagaagtttccagagcttctcgtgagccccagaagcagcattggaggagatgggtggcctcctaggggatgacttggaagtccagcctcctctgactgtgcaagtcctggtttgcctgtgagaaaagcccagagttgcagttctgtcaggcttgagtgcacaccctccctgcagctggcagtcttgggaatggggccagagctggtgattcaaacagaggggatgctcattttcaaagtgctttgcctcttcatgaatccccaaatccactggtagggtgaaagagacttcaagaacagccagttgaacccttcaggctagagaggagaaatcaaggcaatggggaggaacagctcttccaaggtccagaagccaggccagcactttccccagtaaaccagatttggtggccatggcagggtaatggctgaacctaaagcagggtcatggactagatgacctcttgagatgcattttttttttttttgagacagagtctcgctctgtcaccaggctggagtgcagtggcacgatctcagctcactgcaacctccgactctctggttcaagcgattctcctgcttcagcctcccgagtagctgggattgcaggcacatgccaccacgtccagctaatttttgtatttttagtagagacggggttttcccatattggccaggaaggtctcggagatgcattttaacactatgatcatcagcagtccagaagaccccattcctagctaatagctagcctctagctagccccttctatcccaaaccctctaaaaggttaaatttattcttttaacaaatatttattgaatattcctatgtgtcagatattatgctaagtgctggggaaacagtggagcataaaagagatacagtctgtccattgacacacagcttatggcctagcaggagccagggcagtggtgggtgagtcatgatcaaccatgagttacaaaagtggaagcacaatatgctacagaatcaggggcatcaggaaggaggtcagcgtgacctctgaccgcagagaccctcttctgcccctccacactagctcctgtcagcgttgtggttaaacacccagcctctggagaagtctgcctaaggccaaatcctagctctgccacttagcagatttgtaactttgggcaaggcgcttaacctctctgggcctcaatgttctcacccttaaaactggattagcaataggt

SEQ ID NO: 453 - DNA, 8060 bp, Homo sapiens
acccaggccctccagctcagggtctaaaggaaatcaggcaatgagaccaacggtaagaagtggaatttgttcctcattttcatttgttttcgtaggactctgcagctgagtttatctgctgcagtttggcacttcttgccctaagctttttgagacaaagattgcgaaggaaggagatgaggacaagggaatgaggaggcccaggaggtggagccaaagggataagaaaaagaggccccaggcccctgtgtgttttatcagccgaacagaaatgctgctgaagacatgcatctgcaaaggtggtgccaactgggttgggtctacaagtgcggagcactggggaccactgaattagtcagaggtccccaagcctgctcctcctctgtcgccatatggcagagattcaaagggtggagtcctctcccctctggaaaatagctgataaaattcttttcccttttatttttcccctcttacatgtagccctggacaggatatgggtgtggggtcagcaggcacgaaggacccaaaggaagaagaggaatgtgacggggagggcctgggggtgttgttagagtgaggatagggacaggccttggaaagcttggaggaaatagataccctgagcctgacaaaggggttccctaattacctgaaaggcttcctgctccagccagcactctggcagtgctgcctggtggcccttgagccccttaccctgactctgctctgtgatctcccccacttccaacaaagacagcccacttctggttagttgcagtgcctatgcacatgccaccttctcaaagggacagaaaaaaagaacttcccaaaacaagctctttgttggggtaaatgatgagaaaacaaaccacagaaatcccctctaccctaaattttacaataataatagcatttctgcaatggccctatggtagcatttcaaggtacactcagttatctcatttatcccacaatgtatcccaggactgaaaatgactcctagtattaacaaaacaaaacaaatccaagcaaaaaccctagaaagctcttgggaagggcataaaactacaattggctcaagtagtctggcaaggctgggaatggggccttgtgcctcatccctccccaccaaaagctgggatattctcagcatatcagtccaaagttttgccaaggttgtgttgctcccccaaccccaacctcggcaggccaaggcgagactggcacttaccagctgaggaaataagaaaagggtggacctcattcggctgaggaccaggtcatcacaagctgtgtagccaaaggagaatggagcatctgattggaatctgcaccactggccaactcacccctgtttttttgttttttgttttttgtttgtttgtttgttttgagaaggagtctcgctctgtctcccaggctggagtgcagtgccaggatcttggctcgctgcaacctccgcctcctgggttcaagggattctcctgcctcagcctcccgagtagctgggactataggggtgtgccaccatgcccagctaatttttgtaattttagtagagatggggtttcaccatgttggccaggatggtctcgatctcttgacctcatgatctgcctgcctcggcctcccaaagtgctgggattgcaagcgtgagccactgcgcccggccgactcactcctgttatgagggcctagtctagcacccactctagaattttgaaacctcattgatagcttttccttgccccaaagcacacatccaggactgccaaacagggcaacccaaaacttctctcagagcttcctccagcccaggggcagctgtccccagctgggcggacccaaagatggacaacagaggagactgggaacaaagaggtctagtccaggtcactctgcagggccacagtgggtggcccttaggatgtagtgagagtacagaattgggagccctagagtgctgtaagcaaaagggagagcaatgtacaaagtttcaaaagtttcaaaccttccaagtgcaaagagatgaggtggagaatgtcattccccaaggaaagtaatcgagtataaatatttaccgggtgcctattttttttttaaccgaagtgagagcaagaccttaagagtaaggatatgtgtaggtgagtgggggcagtgttctaacccatccactagctttagaacttggagcaggggcagaggaagaaaactccaaaaggtgacaagttttgaaatttgtgcaggggtgacggtttttggtaaggcgagcgaggctgggcgcagagcaaattctgtctacttctacctcctccgcggtggggttgctgaagtgggaattcaaactcagcttcccaatcttaaatgcaaggtttttgtttggttggttgtttggttttgtttttccttttcacggactgttcattccgaacacccctggcctgggacctggagcctcatccctgattcgcttccctcgaattccttaatgtccacttctggctctcccagtccctgtgcaaggtgggcacaccggccccttcccagcaatccgctccgtgtctatactttctgaatcaaccaagagccacaaaacttttcctgcttctctcctccccagtctcccggttctggctgcaacttcgcactccgcgcctctggcaaccagaagagaccctggcatctccaaagcgctttatctcagtccattggaaccagtcgtgctgaccgattcacacctcggctaacgcacactcgcgggggtgatggccttcccttcccctcccacccccgtcagctcccaggtgaggcgctggccccggggggaagcagctgtgggcggcagtgcgtgggttgggcaggggtcccttccctccgtgagactctgctctgctgttcagcctcccagaaagcctccaccctccccgcggcgaagccaagcggccgcggcgcgcgggcggtactcacgcagcaaactcagcaagcaaagcgcggtccagccccgcggcatcctgggccctgcgcgcgcgcccctgcggaccagcatccttcccgcgcggctcctagagagacgcaccgagtggaagacactactcggcttggccaggacgcgctcttcccgccccctccgcccgggagaggggtgggggattcttgcttttttcctctcttctcccctccctttttagtcttggcaaggcagcgcctctccttggctgctactaacttgagctcccctggttggtcccaaaggcggagggcgttaggagggaggctgggttgccgccgtcgaggccaaaaaaggtggaggtttgttcgggctccagatgcctcgttcagctttctggagaggccccatcccacttcttcaagctccacttccacttaacttttaacccctttgtggcagccttgccggtggccagggcaggggcaagtttcctccgattttttccccacttttctttccttgtgattttcctttatttttaagttgtaagccagtaacaatcttgcaaaaggaatctactgtaaggacctcagtttagaagtgtgagcatttcgttaatcaggtaaaacttaaccacaatgtggcacatttagtgatagcctcaccagatcctgtgctgtgtgtgagtgaagcgtcaggagtgagcaggtatacgtgactataagtattcattttggctgtccaaaccattcttggagactttttctttcttttcttttcttttttttttcctgcaagacctttttgtgttatgttaactttttgctaacttgtgttaacttttcctgtgaccttccatatttccccatttagttccccatcaccatcatcctaaagaaaaaggacttccctggatgccttctcaccagttatcccctctccagccctgggtctaagccactagggatttcaccttgctctcccatcagaaaaaggactttctgtgactccatcctccaccacttgatagatccttgagcttcctgttcctcaccagttcctctgggtgttggttgtactgaatagaagaaactctgagccgggtaggcagcctagtcttggggacgtagagacgggagaaaggagaagccagcctgggcagatgatggcaccaggggaggatcagataaggtataacctgggagaggctgctctgatatccagagcagaatcatgaaattataaatactcagttcaggctcttccatgatgtctgtaccacatagcctaaagggaaaaaagagaagccagaccagcactctgtggtcctttctgatttctccgcagacactctagcattataaaagtagctttacctttatagtccatctcaaacctactatgcgttggggttgcacaggagaaggatccaggtctaaaaacaaacccaaaatctccttattctggtcttgttgcctagcattcctttaaacagggaacaaagtctttcatcacacaataagagcaaaggcctgatatgctaatttgattgaatacaacggaatggtatgaatctgtttcaaagtacaaatgatgattcagaactgatcacatagtgatggcaagggcctggggacagaaggagtggcaaacatgcattttaaaatcagtcattggtccttgggactcccaattaacagggaaaaggagttagttccaacactgccaggccccccactcccctcaacttcctcagctccagggaccgctcggtctgcttcaggcatccagtgtgcagttgagaacaaatgtggggttgtaatccctgctagatatgaaagctaatttggtccactttaacttccatttccagattttttttttctggttactttaaataccatttgtctcccatagctggaccacgggaaacaggggaaataacttgtctttctttagtacctgaacttcttaactagctttgggagcaaagagagagagaatgattctgtggagcagagttttctcaaagcatggtctacacagaatcaagggtgagggccagaatctgtactttgagtaagtattctccatgactcatgcacactgaggttcaagaagccctggtatagaaagaacacttgctgggtacaaggagcaagggcgaagtggatgtcaggcttcagggaggaaaaatagaagtaggggatatgggaggctggcaaatcccttcctctgagagaccagagctgtttcttctctggcttgcaaaggttatggatagccccagaactacaaagctagacagtgattggccactcttcatattttccagggtcactgagactcatcaccccaagcacacacacccttgcccaagccacccccaaacacacgttctggccactggacacaagggtacccagggaccccagccttacatttcctcacaggccaggtagagttgagctatgtagtctcttcaaagttctagcctttctgggctgctcctcaattctctgctctcctgcttcataagctgttgctagaagatgttagctacaccgcacaaaatggaggatacaacagaaatacactgagtcagaggctgtctcaggccctttacagacccttggaggtcacaaccacttttactattaaacatcccttacctcacccctccccaaaatacacacgcatcatgtcaatcaacctaaaagaggacctcatcctatgtcaaatatgtctgatgttaaaaaagtaaggaaaatggttgttataattctgaattttaaaatatattcattttgttcttataattcaaactttattatatttacatgaaactatgaaagagttgaattgcagtttacaagttgagttgacatttttgtaggcatttaatgaaaaatttgtgaattttgattttccaattttatattttggaaccaagacttttttcccacattgcaaacttttttttttttttttttttcagtttggcagggatccttagcggtagaagtgttcagatgctggactgatgcagtgacaacctgcaagtcccttttttcctctttccaccttctagtctccctccagtgcctcctcttggcagaacctaacaagaaatcagctgacaagggagtctgggaaccagtgtcctgtggtaagtcaccatgatgcaatgtttgcctccatgataggcaggctattccagaggccacagatcaggaagactcagaccaaattatgatgatcaaatcacaagggttatggaatctatttaaagcatagagccagaaccaaggggacagatttacacaaggttgatacacttgggaatgcaagcagggcaaaagtcctgcacagtctcacagcctcagtcatgtgtttcgctctgcagtggtatagttatgaggaccagaactgagattgagtaaggggatcaatatgaggaagatgcttagaaccaaggtatactcattctattgagagatgtttaagggtaggtaggcttggccacaggtctttgtcagtgttctgggaagccatactttttgccagtatttcttgggtagagcttatggggggccagaaggtgccaccagtaggtagtcaatttagggatgacatggacaccagccagaaggtggcataatctatacctcatggcttatgatttgttttttcctatccttttctgcctgtaagtagcactcttgtttgttccatccttttgtagtctattccatttattctgttttacatgtcttgcaggttactaacttactatagattgagaatcccaagtctgaaatttgaaatgctccaaattctgaaacttttcgagtactgacatggcactcaaaggaaatgctcattgaggcattttggatttcagatttctggaatggggtgctcaacatataagtgtaatgcaagtattccaaaatccaaaaagtatcccggataagggatactccatcctgcatttttagcacatcttctgaattctgcctatgtctcacaaatgacttgcttactttgtatctatagttaatacatctgatgagtttcacccacctgcttttcttgtcctctgtatgaaactgaatattctcatgtaacagagcaaacacacattgtagccagtattatagagaaaagtacagaggagtaggttggggctgagggagacaaaataaataactagcagaaaaccagttttatgtatttttcatacagctaaccattttcctagttgcatttactgagtagtctcttctttcccttctgacctgacatgccatttctgtcgtgttccacatttcatacgtatgtgggtctggctctaggctctctagcattggtcagtatggacaccccaagtgccttcgccattgccttatttactgtagcattaaataagttcagacatctgtagggcaagttttcctctcccaaattgtcttcagaaatgccctgactattcttggctctttgttcttccaaataataataataatatacaattttataaatgcttatcagatttccttccaaaacagccttttggattttgatcaaaattcctccatagatcaacctggggagaacggaatctttccttcagagaacttggtatatatctccattgtttgagtcttcattaaagtttataattttccctgtaatggttttaattcattcattattgttaagtgataaattcatttaattcattgttagatttattcctaggtaatttatgtcctctaagactatggcaaatattatcttctttttaattatttttgttgctggtgtatgaaattgcaatttattgttttatattaatcttttattgagctaccttattaacttatcttattagattgaagtatttctagattattttgggttttatatgtaaatgatcatatcacaagcaaatagtgataattttatgtttccttcccaatccttctgcaactgatttgttttacttaagttaatatactggcaagaacatctaaggatagaaaggagtggtgatcatgcacatcctcacctcattccagattttgaagtgtaagcttctaat

SEQ ID NO: 454 - DNA, 8060 bp, Homo sapiens
cagtcttctccacctttggctctggattttgatgatgcctcaactgggagaagtgtaacacctacgatgattgagacattctttgtctgataggatgtgagtggtcatgagatgttcaatctgtgagaagaagctgtaagaggcattgtgagatgacaccacttctgttgctcttcctctttcaaattgtccttgctctattatttaaaagtccaataataacaaatgctggtgagagtctggagaaaaggaaatacttccacactgcttttgggaatgtagattagttcagccattgtggaaagcagtttcacagttctcaaagaccttaaaacaggattaccacttcactcagaaattctattattggatatatacccaaaggaatgtaaatcattctactataaagacatatgcatacatatgttcatcacagcactattcacaatagcaaagacatggaatcaacctgaatgtccatcaatagtagaccgaataaagaagatgtggtactatacaacatagaatactacagagtcatcaaaaagaatgagactgtgtcctttgcaacaacgtggttggagctggaggccataattcttagcaaactaacgtaggaacagaaaaccaaataccacatattctcatttacaagtgggagctaaataatgagaacacatggacacaaagaggggaacaacagatactggggcctccttgagtgttgagggtggtaggagggttaggataaaaaaaactatgtatcaggtatgcttattaagcgggtgacaaaatactctgtacaccaaaccctcacaacaaacagttggcttatatagcaaacctgcacatgtacccctgaacctaaaataaaagttaaaaaaagattgtccttactgcccaacattcaagagctaattaagcttggatagtcctatggctgaatatttttgtcttgtccaggatatatatgtcctaatccccaatgagaaaacttccacaatgtagactctgatgtgattttttaaaagcatgactttaaatcatttattattgggatgttttgttacacaacattagattactgatacaataatcaaagcaacataactaaagatattcagaattatctttttttaggtgtcagatccttttgttttttagttttttattggattcactgtatacagaatattctgttggctctttttttttggtgctttttctgatatcagaaagcagtgttcataattatatggatatttatatttacttcacataactgtatcataggatgactacttttagatttcctctaggtaaccagaagagtttggcaggacatgtatatttttgctgaaacaaattgcaacctggaatctcaagtctctaatctcacatgcaatactgggaagaaattcaagctcttatgtgagtcatcattagagagtttggagtataaaagagataaagcaagtgatgatacagtaaatacacatatccttcacttacctccagtttaatgcttgtgacataatttattaaagggagtgatagttttagaacaatgcaagaagtcatatttgtagcactggaaacttttaatcagaaacagaaagatgatgcaatcaaataatgtagatcatgacaccaaatcctttacctaaatgaacaaacctcattacccatggacaacaagcttccaccctttaatgagttgtattagtccgttttcacactgctgataaagacatacccaagactgggtaatttataaagaaaaagaagtttaatggactcacagttccacgtggctggggaggcctcacaatcacagcagaaggccaaaggcatgtcttgcatggcggcgggcaagagagcatatgcaggggaactcccctttataaaaccatcagatctcatgagacttattcactgccatgtgaacagcatgggaaagacctgccccaatgattcaattacctcccaccgggtccctcccatgacacaaggaaattatgggagctacaatcaaggtgagatttgggtggagacacagacaaaccatatcacacaccatcaaaaacaaatcttccacgataatcactgcatgactgaaaattttagtccatcatatttaaggtcgtctctgaatctgaggccatatgaagtcaattgattcatgcaaatgtgtctttctgtgtagactacactaggaacatgtatgttataagtaatattcgccttcctcctctttaccagggaatatagtaggcagtgtagacactgagctggatagcagacaggatcctaatgaggagaataaaatgccatgatgattataaacacaccagcatggtcaagtttacataatcaggaagaacagtaaaggtagtaagaaatgaaggactcagaagtaaaaaactgtgatctcagatattcatctataatatgattataccaatgaccttacatttgccaagtgcaattgattttttaggactgatacaactctctagtgtattagacaaataggaatctccaaaagtgttttaccctagtttggaaataactatgggaaattaggaaaatgacaaacaaaaagtaagttggatatcagagcagaaagctttctaaagaaatagcataagtctgacacagcacttgagaacaaggaaattaaaactctagaaactgaatagaagcagaacattctctttccctccttccatgatctgattcgtgaatcacaatgtttgagttcggttagagctttgaaatcacatgtacttcttgaaagatgctcattttatttcttccttctgaagaattgttttagagccccctttatgtctttattcctcagactgtagatgaaggggttcagcatgggggtgaccacagtgtacatcagaggctgttgcacttgagagtgagttgtgggttgcagcagcactaaggtacaccccaaggctcatacaataaaataaggagacaactgagaggtgcgatgcacaggtggaaaatgccttgtacttcccctgagctgatgagattgcacgtatggaggaaactgtcttaaagtaagagtacaggatcccagtgaaacatcccctacctagaagcacagctgacaaatacatcaccatgtcattaagaaaggtgtcagaacaggcactgcggattatctgattaagttcacagaaaaagtgggggattttcaagtctgtacaaaagagcagtggcaacaccattaagctttctatcaaggaattcagggcactcatgatccaggacgccagaaccagcagtccacagagccgagggttcacgatgaccgtgtagtgcagggggtgacagatggccacaaactggtcataggccatcacggtcaagagtaagctgtccaacactataaagagtacaaaaaagtacatctgggtgatgcaacctgcataggtgatgactttactctgtgtccggatgtttgacagtgtctttgggactgtggtggaggtaacacagatgtctacaaaggacaggttagagaggaagaagtacatgggggtgtggaggtgggaaccagagcagatggccaggatgatgagcaggtttccaaacacagttgtcagatacatggagaggaagagtccaaacataacgggctgcaattctggttcctctgaaagtcccagaagaagaaatcctaaaatcctcgtaccattctctggttccatgtggttgaggtgactaccagtcagagaaagagaacatgaccaatttttactcaaaagggcatcactcacattgttgaaagacaaccagttatattttgcagccaagacattaatttctatattttgtgtatggaacttttcccagtttctgtgctcctcagagctgtctctgattgaaaattcttgtgctattctcaacctttccctaagaggttgtatattctttaatgagaaattcttctacgcacttgtgtaatattgattgtatgctgaccatgttccaggaactgtctaggtaatgagtgtagggtgcagagaaactgataaccttactatccaatgatggagaaagacaatgagctgataaagacatcatcatctgttgcgttagatggtgcttagaagaaaatgaaagcacattaaagagaatggagaggggttgctattttttatgagtgtacaggcaagaccagcagacaaggtgacatttgaacagagacctcaaggaagaggcggttgggagcccagaggatatttggcgaagtctgtgcctgacagagggaatgactaatgcaaaggcctgaggaaggtgcttgtttcggaaaatcaaggctcaaatagaagccagcgtgttgagggcaatgagaaggagggagagtgatcagagatggtgtcaggagtattgaggaaccaggtggtctccctgctgctgttgaaacttcaagacactgacagcctcgtctccccatgtggttctgagccctctattaatgtggccccctaaggacgtaaacagggcagcaaattccagcccaaaagcttcccatgcacatgtaaatgtggggctccattttatatcatcactttgtgcctggtatttaacaaaatacatgagaatttgctgaataaacaaagagatgcatgaaataggcatgatgtacacaggtggttgatgagagactgtgacgaaaacagcttcctcgtttctggcaatgttcaatcctggttatagaccccgatgcccagaataattcataattaataaaagtgatatctttatagggtcaagacatcttacagattgaagaccccaagagaaaatgaagaaagggaataaacccacacttcacaaaaggaatcacacaaagtccaacaaaagcggggggcggttaaagatgcaattgtgaaagacatgtgtaaattgtagtaaatgcaaagcaatgtatgtaaaaaacttggcatgtctcatttttgttcttaaatgaatggttatcactggtgatgagatgagactgatgttgctcttccacctctcatttacctgttttgtaatgtgaaacatctatcatcacaaaaaaaagtttggagttttgcatctactctgtacctgctgttggaccttgaaaagcctataaagtcattctaaatttttaaaaattttttataaatacataatagttgcacatatttatggggtacatgtgatactttgatataagcatacaacgcataatgatcaaatatgggtaactggcatacctgccctctcaaacatttatcatttctttgtattggaaacactcgtatcttctcttctagctatttggaaatatataataaattattaagtatagtcattctattgtgctgtggaacagtagatcttattcctttcatctaactgtagaacttattcctttcatcatcaaaaagcatacacatagaccaatggaacagaagagtaaacccagaaataaattcatgcatttacagccaactcatttttgacaaaggtgccaagaacacacattggaaaaagacaagctcttcaataaatggtggtaggaaaactggatatccacattcaagagaaatggaattagatccctatctgtcactacatagaaaaataattttaaaatagaaaaaaagacataaatgaaaggctcaaaactatgagattcatagaataaaacataagggaaattcatggcattgatctaggcaagtaatttttttgcatttttaaatttattattgctatttttaaaaattgtcatttttattgtgggtacatagaaggcatgtatatttctggagtacatgggatgttttaatacagctatatgattcatatcaatcacatcaggataactggggtatccattgcctcaagcatttatcaatcccttgtgttagaaacattccaattccactcctttaattatttcaaaatatacaataaattattgttgactacaatccccttgttgtgttattaaatattagatcttggccaggcacggtggctaatacctctaatcccggcactttggaaggctgaggcaggcagatcgcttgaggtcaggagttcgagaccagcctggtcagcatggtgaaacctgtctctactaaaaatacaaaaattagccaggcgtggtggtgcatgcctgtaatcccagctactcgggaggctgaggcacaagaatcgcttgaactcaggaagcagaggttgcagtgagctgagatcatgccactgctctccagccagggtgacagagccagattccatctcaaaaaaaaaaaaaaaaaaaaaaggatcaaaacgaacaaatgctaacaaggatgcggagaaaaaggaagtctttttctttttcttttttaacaagagacaggaccacactgtgtcacccaggctggaatgcagtggctcaatcatagctcactgcaaccttcaactgggctgaagcaatccttcaacgtcaacctcctgagtagcttggactgcagtcatgcaccaccacacccagctaattaaaacaattttttttagaaaagaagtctcattatgttgtccaggctactctcagtctggcctcaagcagcctcccgcctcagtctatccagttgctgggattatatctataagccaccaggcctggctaagaaagagaagctcttgtacattgttgctggagtgaaatttagtacacttattatgagaaacaggatggaaattcctcaaaaaaataaaaatgcaactaccacataatccaacaattctactactgggcattaatcaaaaaaaaaaaatgaaaagagtgtatcaaagagatatctgcactattcactcttttttttttttttgagatggagtttcactctttcacccaggctggaatgaagtggcgtgatctcagctcactgctacttccatcccccgggttcaagtgattctcctgcctcagcctcctgagtagctgggattataggtgtgtgccaccacgcccagctaatttttctatttttagtagagacggggtttctccattttggccaggctgttcccaaactcctgacctcaggtaatccatccgccttggccacccaaagtgctgggattacaggcgtgagccaccgtgcccggcctgataagctacactattcacaatagccaaggtatgaagtcaaagtgtccatcaatgaatggacttttagaagtaatatacatagacagtggaatgctgttcagcccaaaaaagaaggaaatcttatcatttgtgacgatatggatgaacctggagaacactgtgttaagtgaaataaaccagacacagaaagacaaattcctcatggtctcattcatatgtggaattttaaaagtcgatccgatagaaatatcaattagaatggtggttactagaggctggggcagttgagggagaaggggtatgaagttttttgttgaaggatacacaattgcacttaggagaaataaattgaagagatctgttgtaaagcacactgactatttgatgatgatatattgtattcttgaaaaacgctaagacagtaggtttttgtttgttttgagacagaattttgctcttgttggtcaggctggagtgcgatggcacgatctcggctcactgtgacatctgcctcccaggttcaagtgattcccccgcctcagcctaccgagtagctgggattacaggcacccaccaccacgcccagctaatttttgtatttttagtagagaggggggtttcaccatattggtcaggctcgtctcgaactcctgacctcaggtgattcacccgccttggcctcccaaagtgctgggattacaggcgtgacccacagcacctggcctaagacagtagattttaagtgttctcaccacacacacacacacacacacacacacacacacacaaactaggtgaggtaatgtgtatagtagttagctagctttaatcattccacaatgtatatatacttcaaaacatcatgctgtacacaataaatacataaaattgt

SEQ ID NO: 455 - DNA, 8060 bp, Homo sapiens
gcagaatgtgatgaatgcattactaaggagctagacagcgctaggtgggtccctcagccttgctgagtctgatttcctttcttgattgtattagtttgctagggctgctgtaacaaaatgccccagactaggtgactgaagcaacgaaaatgtattttctcacagttctggaggcgagaagtccaagatgatgatgtcagcagcttggtttcttctggggcctctctccgtggcttgcagatggccaccttctcactatgtcttcacatttgtccctctgtttcctgtgtcctaatttcttcttataaggatagtagtcacattggattagggcccaccctgatgactgtactttaacttagttactttttattttttagagatggtattgctatgttgatcaggctggtctccaactcctagctgcaagccatcctcccttggcctcccaaagtgctgggattagaggcataagccaccacatccagccttaattacttctttaaagggatgacatggtttggatctgtgtccctgcccaaatatcatgtcaattgtaatccccagtgttggaggtgaggcctagtgggaggtgattggatcatggggatggtctttcatgaatgtttagcatcatcctcttggtgctgtttctcgtgatagtgagtaaatgagtgatcatgagagctggttgtttaaaagtgtgtagtacctccctgctccctctcttctgcctgctccagccatgtaagacgtgcctacttcccctttgccttccaccatgattgtaagtttcctgaggcctccccagaagccaaggagatgccagcatcatgcttcctgtacagcctgtggaaccataaatacaaaaaattagctgggcatagtggcaggtgcctgtaatcccagctactcaggaggctgaggcaggaaaattgcttgaacccgggaggcggaggttgcggtgagccaagatcgtgccactgtactccagcccgagtgacagagtgagacttcgtctcaaaaaataaataaataaataaaaataaataaataatcacacatgtgctgggaagcagagggactgctgggagaccctctaatcaggcaagagatgggcatggcctgaactaaggcagcagcagtgaggatagagagcataggaaaaaaatgtgaatttatgagagagaatcaacaaaattggtgagtgattaggtgtggtatcaaaactcctgggtgagacaggcacagtggctcatgcctgtaatcccagcactttgggaggctgaggtgggcggatcacttgaggtcaggagtttgagagcagcctggccaacatggtgaaaccctctctactaaaaatataaaaaattagccgggtgtggtggcgggtgcctgtaaccccacctacttgggaggctgaggcaggagaattgcttgaaccctggaggtggaggttgtagtgagccaagatggtgccactgcactccagcctagatgacagagtgagactctgtctcaaacataagacaaagacaaaaacaaaaacaaacctgcctggatgtctggcttggtcaactggataggtgtggggaggacaggttgtgctgttcgctgaggtgtgaagtggaggaggaagagaagcaaagatgatgagatccactttcaacctgttgaatggccatatctatcaggtgtctaacctaatggttaatatcatgagtttcagagtccacagacctgaagtcaaatcccagcttgtcaggtcctggctgtgtgatcctgggagttactcaaactttctgaactgacatttgttccccataaaatgggtatagtaatatctcccttataaggttgttgctgagaattaaaggagattaaatatgttcagcacacagcacagtgtacccatgcatctggaacgtagtattacgcagtaagtggaaagtcattattattatcactacatttagatgaaatgatgagcaaatccaagctttcttttggttgctttcctgtgtgtttatagatcatgtctctaacttggatttcagttcctctgctccatttggaaacagtgccttctacttttttttttttttgtcatttgttcctggagatcggagtttttccctgatgctcagctctttgatagggttgactagaaggcaggattattttgtttactggaggcaaattttgagaagggaactcaatgctcactccacactcttaccaccaggtggcgtccctcctctggtcatctgcatgtagagacaaggtatgagagaatcaacaaaattggtgtgtgattaggtgtggtatcaaaactcctgggtgagacgggcgtggtggctcatgcttgtaatcccagcactttgggaggccaaggtgagcagatcacctgaggtcaggagttcgagaccagcctggccaacatggcgaaaccccgtctctactaacgatacaaaaaattagccaaacgtggtggtgtgcgtctgtaatcccagctattagggaggctgaggcaggagaattgcttgaacctgggaggcggaagttgcagtgagccgagattgcaccactgcactgcagcctgggtgacagagcaagactctgtctcaaaaaaacaaaacaaaacaaaaaacatcgataaaaaataacttcaaacataaaaaaggaataaataataaccccctataaccgcaaacttactgaattgtaatgttttattttcttatccagttcacctactagacagtgacttctgtgaggagaggacctgtattttatgacatttcctccccagcccctgtgtctgacatagatattcagtgagagtttgaggaataaatggaagtacactcggtcccacttctctgttcatactcttctgctttcctccttttttgggagattctccccatctatgccttcagtttttgagaggcaagcaaggagtcagccgtgggcactcccccgacactgagaactagggatgtcttaccatgacaccctctgccaccaaagcttggtacactagaaacagcatgggcttggaaccacatacatgtatccaaatttcagctctttcttttttattcttatttatttatttgagacagagtctcactcactctgttgcccaggctggagtgcagtggtgccatctcggctcactgcaacctctgcctcctaggttcaagcaattcttctgcttcagcctccagagtagctaggactataggtgtgcaccaccatgacaggctaagttttgtatttttagtagagactgggtttcaccgtgttggtcaggctggtctcgaactcctgatctcaagcgattaccctgcctcagcctcctaaagtgctgggatgacaggcatgagccaccgtgcctggcctttctttttttaaaaaatgaacatgacaagttgtttattgtctctgagcctcagttgcattatctgtaaaaataagaattataattgatttgcagaatggttgtgggagtcaaataagatacccaactgcttggcatagtaggtgagcattaaatgtttatttcctttcctgtgggttttatgttgattctcggaaaatgacttcctccttggggaggaacggctgttattcattatgcagctggaacaatgacaatatggatctttgggaaacaccagcttcccctgccccagcataggaaatggaatgtcagcctccccccgcttacccaagtcctctgtgtccaactaggccagcgaaaaatgagaaggggctgcagtgcctctgcactgtgtcctcccagttatatttgtccattcttccattcatgtattcattcatacaacactccatatggctgagtgcctactgtgtgcaggcccagggctgggtgctcggactcagtggtgaacagatagacttggccactgccatcacagagagttcgtggatggaggcgagatacccgcacaccttgcgacagccttaactgtaactgtggtaagagctatggataaaaagtgtgggctctgggagggaatgacagggggatctcacttgttctgaggcctgcagggcttccctgaggaattggtgctgaaactgagatatgaaggacaaatgggagtcagccaggcaaagtgggtggggagaagagaaccccttccatccttgtactccctacttgccccctttccccatcaacttgtggggtggcccatgtgggtgcacaccccagcactccctgccacaaagttctacctgggcctcacccccaaaacctcctggctcagcccctccagcccccttctcaaatggctgcaggaactagagtctccttctcaaagaagttgtcctaagatgacagcagagaaacgtgtccccttcaaggagaacttgccttctactcaaggacacatacagatgaagtatctttaaagaacagaatctaaaaacggagatctcaggcactttctggccagagttttggggaatcttgtcagtgttttgctgactctaccctgagcacaatctcctgccacatgggtccatctttcttctctccctacgtcactgcgattcttagcctctccccaccagagcaaacaggcaacaccctgagtctgtccttcctgctttggcacagccagaggccagggtctggagcagcccagggcaccaggtgaaggtacacaagtgttccatcgctgggccagaggacccagcccaaacaagggcaaaagatgaacttgacgtcagtcctgggcgaggctggccaacggtctgtctgtgagcctcaaaaggaaaagaaggaatcatgacgaatggagtcaggctgctttcattttcttttcttgagtaggctgcagagccaggcagtgctggcaacaagaggcaagcccctgtagaccctctgcagatgggatgaggacacatatgcccgattagagcatagccagatggtggcatctttagtggcagtgctgtcctgagtgctgtgccattgaagggatattgataacttggatgtagatagagtgatcaaagatgacactaatctgggcagagagataatgaaaatcatcatagttagcatttagatgcctggcctgtttcactttgccacacacttttgcattgtatttaattctcatgatgactctaagaagtaggaatgatgtccctaggtgacagatgaggaaacagagacttggcaggggtaagctacatgcccaaggtcacatagctaatatgcggtgagttgggcttggaaaaccgtctgagggtctcaccagcactgacaaactccactccgctatccatcatccatccatccatccaacaaagatttagtgaactccttccaagtgttgggcgacatgtgaggtaaggcagacaaagtcctgctctcatggagcttacatcctaggaaggagaccgaaaataaagaagtaaaccaattttaaaacatttcacagaagtgctatgaaaaataaagtcatggccaggtgcagtggctcacacctgtaatcccagcacgctgggaggctgaggtgagaggattccttgagcccaggagttcaagaccagcctggacaatgtagtgagaccctgattataaaaaaaaaaaaaaaattagctgggcatggtggcgtgcgcctgtagtaccagctagttgggaggctgagatgagaggatcgcttaagcccaagaagttgataaataaataaataaataaatataaataaaaataaagtgaggcaataggataagtccattttacactgaatggccagggaaggtgtctcttaggaattgacatctgtggcaaaagggagccaggtggggagtgtctggggaaggcctgtaggcaggggtaggtttggcatctttgagaaacagcatcaacttgaatggattaagtgagctgtgcttctagactgagtttcaagaaattgtttaggataaatgtcaggtcttgtgcttgggcccagggtactgtggacttgcctggactgggctgagtgagagaggctggagtctcagttggtctggtaaagttaacacgatcttgttgtgctgcgctgataaagtagtgtctggggtggagaaggggatggactctttcccctgtgtgctggtcagacccaccaggagatctgcatgctcccgggctgcacatggacaaattagactgtctcgcctggagaactgccaccaggacagtgagcaggatggggcggaaaaaccacttactcctggcagaggagatatggggaggcacaagcactgcctccagaaaaatctagggtcagtgggaaggagttacaaggaattagatttcttttacttctttcttcttttttttcattgataaaagagatatgtgcaatatctaaagtagaaaaaaagcattagaaaaaggaaaatgaatcatttaaatcccttatctactataggcaatcactgatgacatttggcataatttcttttctaggcttaagaaaacatactgggaccgggtgtggtggctcacgcctgtaatcccagcactttgggaggctgagactctgtcaaaaaaaaaaaaaaagaaaaaagaaaaagaaagaaaacatactgaaatcatactgagactctgtcaagaaaaaaaaaaagaaaaagaaagaaaacatactgaaatcatactgtgcatatgcatgattttattgatgtgtctatgcttgtctagatgtttagggaggcagtggaggagaggggctagaggcagactctgggtgcttggcctgggcttggatcccagatctgccttttattacctgtgtgactctgagcaagggattccacctcccatccctcagtctcatccaaaaaatgagggtaatattagtgtctaccacagagagttatttgaggagtaaatgagccaatagtagttataaacactaaaaacagtgcttgcacaaacctaagttacatatttaatacataagtaaataccatccttcttttaacacaataagcattttatagtgatgtcgagaactgtatgtaaacatctttccattgtctgaataaaatcccttcatatattttcccatagcttattgagacatcccccaatgtgagatattgtgtatttctcatgttgcactacttacaagtggcacatttttgattggttcatttggatagagtcacagaagtaaaattactgggttaaaggatgtggactttgttctgtatttttttctttttcttttttcttttcttttctttttttttttttttttgagacggggtttcactcttgttgcccaggctggagtgcaatggcacggtctcagctcactgcaacctccgcctcccgggttcaagtaattctcctgcctcagcctcccaagtagctgggactacaggtgcccgccaccatgcccagctaaattttgtgggttttttagtagagacgaccagtcagaggcaatggggtttcaccatgttggccaggagagtctctatctcttgacctcgtgatccacctgccttggcctcccaaaatgctgggattacaggcatgagccactgcacccgccccccgccccccactttttttttttacatttaaaaagtttatttttggataagagaaaccatacaaatgtaaaacattcacacaatacaaaaggatatacagtaagaaggaagtcttccagtgactcctgtctcccagtttcccgacttagtggcaccaaaatcaggttcttgtttatgcttcaaacgataattagtacaaacagcagatatatgtatgtataacccccatttaaaaaaaaatgatatccggctgggcatggtggctcacacctgtaatcctagcaccttgggaggctaaggcaggtggatcacctgaggtcaggagttcaagaccagcctggccaacatggtgaaaccccatctctactaaaaatacaaaaattagccgggtgtgatggcacatgcctctgatcccagatactcgacaggctgaggcagcagaactgcttgaacccgggagg

SEQ ID NO: 456 - DNA, 8060 bp, Homo sapiens
caaagaccctattcccaagtaaggccactttctttctttctttctttctttctttctttctttctttctttctttctttctttctttctttctttttcttttttttttttttttttggtttattaaaaaataagtttattggccgggcatggtggctcacgcctgttatcccagcactttgggaggccgaggtgggtggatcacgtgaggtcaggagtttgagaccagcctggccaacatggtgaaaccctgtctctactaaaaatacaaaaattagccaggcatggtggcacatgcctgtaatcccagctactcgggaggctgaggtaggagaatcacttgaacccaggaggcagaggctgcagtgagccgggattgtgtcattgcactccagcctgggcaacgagagtgaaactctgtctcaaaaaaaaaaagtttattgaggtatatttttcataaagtacactaatattaaagttagaacttgatggagttttgatggagttttacatatggacagattcgcctaccaagattaggttacataggatatttctagcacacaagatttcctgtgttccgtcagcggaagtcattcttagcccctaaacctaacttccaccctgacttctatcagcattacttttgcctgttcttgaacatcatataaatggagtcacagagtacataatctttttatttttttttttttttgagacagagtcttgctctgtcaccaggctggagtgcagtgacgcgatctcggctcactgcaacctctgcctcccgggttcaagcgattctcctgcctcagcctcctgagtagctgggattacaggcgcgcaccaccacacccggctaattttttttttttggccaggctggtctcaaactcctgacctcaggtgatccaccctccttggcctcccaaagtgctgggattacaggcgtgagccactgtgcccggcccataatcttttttatttggcttatcatgctcaacattctgactctgagattcgtctatgtcattgcacatagcagtagcttagtattttttttatgtccataggttattggggtacaggtggtatttggttacatgagtaagttctttagtggtgatctgtgagattttggtgcacacatcacccgagcagtatacactgcaccctatgtgtagtcttttatccctcacataaggccacattctgaagttccagctggatatgaattttggagacactcttcagcctaagtgatggagccccgagcacagggcccacgctggccagcatctggttccacacaggaaagccaagtccctgtcctggaggactcaggactccattcggggtttcaggctggccactcacaaccacacccaccgtgggtcagggggttcagaaagtgacctggctcttgcaagacggatggagaggagcctcgctccagggagaggtgcctccaggaagggctgaaacgggttgaggtccgttccaaagtctctagttgacctggcaggacccctggcttggcttgtcttgacataggttgtttgtgccctggggtctctggttagaaggtaggacaggcgcccagtttttctccattttgcgtgcctcctgtcatgatgggagccttagagcccggctcgtctccagctctgagcctgcagcagtggaggtttccctgcctctgcactctgtccttgaaatattcattccaggctgggtatggtggctcacacctgtaatcccagcactttcagagactgaggcgggaggatcacttgagcccaggagttggagaccagcctgggcaatatattttctacagaaaattaaaaaaaaattagccggacgtggtggctcatgcctattgtcccagctacttgggaaactgaagtgggatgatggcttgagcccgggaggttgagactgcagtgagccatgattgcgccactgcactccagcctctgtccagggtggcagagtgagagcccttctctctctccctctctctctctgtgtatataaaaaaatattcattcctgtcaaaggagtgtccatcttgcccctgtaggtcagcatggaaagcagctccacgggcttcatctggactgatgtcagagcctggcagacatcaaatcggcatgtttcttcttggagggaacccaggcattctcggtgggagcacatcactgccaaaagggagaacactggttcttgaaacaatcttagctgtaagaaacctcctagacgggcaataatgagaaaaggttgatgtgccctggtctaacccaagtccctgtggctgctgcttcaaccacatcaatatcagtgctgatcacgaatgcaaacagtgctgatgtcacacaggtgccgctggccacgcactttacagctctcttcattcagtcctcaccatggtagctgcccttatgtcttaaaagatgagactggtgagcacagagaggctcggtgacctgcccagggtcacatagctcataggggtctgagcttcctctcatctccttgtatcatactggtaatgaaccttgatgagttttggatagatgaaaaatactcctacttccttcttcctgaggactttttgagcaaatgaagcaggtagcttttacgtctcttctctttctttgtaatctcacagaaggctgtcgtgcattcaactttgtgctccaaaaagccatgtccaagtcctagccccaggacctgtgactatgacctcatttggatataagctctttgcagatgtaatcaaattaagaggaggtgctactggatttggatgggccctggttccatggctggtgttcttataaagagaggaaagtggacacagacacacacaggggagaaggccgtgtgaaggcggaggcagaggtcggggtggagcagccacgggctgaggaacactgagggctgctgctacctctggaagctgggagggaggcctgggggaggctcccctagagtctaaaggcgccggccctgctgccacctcgctgtctgatttccagcctccagagctgccagaggagaaatgggtgtggttttaagccacctggtttgtggaaattattgcagtcaccccaggaaactaacacaaaaatggtggcattttttattttaagagttttatgtttgtttgtttttgtcaaagtttgccttgggcactgaactagagtgagaggacagactggattgtgtgtgcatgtgtgcgtgtgtgtgcatgtgtgtgcatgtgtgtgtgtgcgtgtgtacatgtgtgcgtgcgtgtttgtgtgtgagtgtgtgcgtgtgcacgcctgtgtgcatgtgtgtgtgcatgtgtgtacatggggggcttgttccccattcctgtcatctgccttttgtcccctccacttcggtgtctgctttgctcccacctgtcaccctgactagtcccccgatgtgtatggggccactgccctttctttccttaggaaaggtggaggtgggagagtgtgatggctgtagagggcgggtggccattgagggttcctgctatgccttctctagtggacagctcactaggctcagaagaggaggagaggtggggtttgcagacccgaacggagcccaggttggaaaaatccttcatcgaattcccattatgtgcagccataaagaccagtaccttgtatagggataaacggagcttaaactgggcctgcaaagccacggggtgaggtgagaatcaaaggaaaccgaattaatgtgttaaaaaaaaaaaaaggcaagcagcttcctggagaaagacccccagggctatctttgtgtgagaagatctgccagctgaggggaatccatctcaatagaagtttgcaatgagataaatactgcatatgacggctaataaatgtccctgagagctgagtagtaatcaacacaggaaataaatcctccaaaaataaaagcaacactggtatcgatggtgaggtggagggctgtggtggtggcagtcacctcctttaagatcctgggaaggatttgttctcaggaagccagtgataatttaccggagttttaatacctggcaagttcccaggcttctgcgggtagaatttattttggcacaatatggcctcttgggaggaaatagagacagactcggagaggcccggctgtgcctaggaaaaggcctctgtcacctgtgtgacccctggacagaacctagccaggctcttgaatggaattcctctgcctgtttcagccccatgcactgcccttcagcacacatgcagtaatgcacggacatgcctgacacgtgcagatagggtcacatgtgcagatatgggcacacgtgccattgtgggcacacatgcagatgtgggcacatgtacagttgtggccacacatgcaaatatgattacatgtgcagttatgggtatgtgtgcagttgtgggcgcacatgcagttgtgggcacgtgtgcatatgtggggacatgtgcagatgtgggcacctgtacagttgtgggcacacgtgcagttgtggccacatgaagacatgttctctgactgctcagggaaggtggacatgaggcctggggccgaggggtgggggatgtccactaaagggctctctgcagatatgatcacacatgcagttgtgggcacaacatgcagttgtgaccaacatgtgcagatatgggctttcccgtatgtctgtaatgtgtgtactggatggggtgggctgccagctccatcttctcacccgattcactccccaccatttggtctgcttggggtcagggtttgggagcctggggcattgcagagcctgccgcctttgcctgtgggccttactggcaggaccctcatgggaaggtcaccccggccggttctgtggctcacctctggcttttcccacttaggatgccccctggggccggcctcatggagcggatccaggctattgcccagaacgtctccgacatcgctgtgaaggtggaccagatcctgcgccacagtctgctcctgcacagcaagggtgggtgccagggggcgggggtaccctctacccctagggggccaatgaactgggtgctgggtgggccctgggagggtgggacacttggggtgtggccgacttctcctgacagcagctctgctggctcttcggggccccagtttaggctttcagcaggacaactgggggttcactccctcgacccggcaggagggcgctgaggacagaggaggtccctggagtctcagcttctggggtccacagttccaggagtgaggccacctggggaagggtccctcggcggcccctccagtccctgtgatgtggggagcagcgagctgggggctgcaaacctcatttctgcctcctcagaaaacgctggggatgctttcgggtgggtgcatgaggtctgcccatccaggcagctgctgagtggctgttcgcaccagctcctcactgcatctgaaccccctgaggaggccgggggcaacctaggcccgggttgaccttgtgggtgggttgtgcggctgatgagctttaaggtgggaaagcctggcagcggattgtgtgggaagctgcctcccgcacgcaggcctccctccctgggctcctccttggaccagggacttcagcaaggtgacctctccctacagtgtcagaaggccggcgggaccagtgtgaggcacccagtgaccccaagttccctgactgctcagggaaggtggaggtgaggcctggggctgaggggtggggatgtctacagctagggcctctctgtctggccctggcccctcacccaggcacaagctggcagaggccaacctcagggaaacagcttctctgctcagtgcatccaccccacccatcaatccaaatcccccagaaagagtctccctcaggtgtcggtgctttctcacagcaaatgattaaatctccaagtgtcaccgccagcagccggattcccccagagactcagaggagtggccctggctgccctgtccctgctcctcctggcccagccaacagctggacggagagtcttcctgccccatttctggggccaccactggctgcatgaagtctgcccttgtaggagtcgtccacagccgtgaagtcagctccccactggttctgaacgccctaaggggtgggcggtggtgccgcagaccccttccttggtgaccatctgggatcactgcaggtggatcccgccctggctccagccctggccgccttggaggctgctccctgaccttggcctctagcccaatcctgctctggtagcagggagacggggaccagagggagagggagacagccaggcctcctggctctttgccccagacctttgagccagtgttctctcccagtctctcctctttccagacatgagggctggtggtcctgcccctgccatctctggggtccttcaggcgggtcctggttcaatctcttctctgccctgtcccctgttgcatcagtagggtgggccacatgggccccatccttgacctcaggacccctgggggtgcacgtgcgggggagtccccgagggtcagtggggctggcgcagccccctgcccagcctggccctctctgcagtggatgcgtgcccgctggacctctgacccctgctacgccttctttggggtggacggcaccgagtgctccttcctcatctacctcagtgaggtcgagtggttctgccccccgctgccctggaggaaccagacggctgcccagagggcacccaagcccctccccaaagtccaggtgggcctgggaggtgggtgggccggtgaggggctggtgtggctggacattcttaaggacagtggacagaaacctctgtcctgagggaatgagactgagctgcttgccaggtgtgtgggcaggtccgagcccaccctaccgggcagacgggaggccagcctgccaaggcctgtctgccttctttgagatgccaccaagctgggcctgtttgcagggcaggtggggggcctggagatgcccccttagtggactagaatagtagtaatagcagctgtcacttattgagggttttctgtgtccagatgctttatttgcacttaaagttcccagccatccttgtatgatcgtatttgacagacgatgcatctgaggtttacaattgaattaatgggttcgaggcgcatagttgctgtggtggccacgtctgtcccctgccatcggagtcctggctatgaccaccaccctcactgcctccctgtcatggctgggaacctggaaactgctatggttggccacctccgtggaagggctaggggcccatggttagagctgggctggggagggtgtgttgacagggcgggcagggctccctggttttgggggctaatgagccccttagaaagtgcaggagaagctggagcaggccccagcctcatgggagggtgccagcccctgtccccaggccagcggggaatgatggtggccgcaggttgaggggcagagagctgaggtctggacccctccaggcagttttccgaagcaacctgtcccaccttctggacctgatgggcagcgggaaggagtccctgatcttcatgaagaagcggaccaagaggctcacagcccagtgggcgctggctgcccagcgcctggcacagaagctgggggccacccagagggaccagaagcaggtgcgtggcccctgccccctcatgtgcaggagctgagaaagctcagggcccccacttctgagtgggcatggaataggtcttcaaacaagctgtagtgggcttctgaatttgatcagagggagagaggggtagggatggcagagtcgggatagatgtctgtggtggtggcccctggcccttttcaaggttgggaccaaatgacaagcccccaagaggtcctgcattctgtgtacatctggttcatgtcaggcagaaaagtcatggtattggcctggaaagttgggaatgttctggggagcttcgttagctcatgcctccattcttccttccctccttccttccctccctccctccctccac

SEQ ID NO: 457 - DNA, 8050 bp, Homo sapiens
tgaggcaggaggatcatttgaacccaggggttcaaaaccagcctgagcaacatagtgggaccctgtctctacaaaaaataaattaaaaaaaaaaaatagccaggcatggggtatgtgcctatggtctcaggaactcaggaagctgaagtgggaggatcacttgagcctgggagttagaggctacagtgagctgtgactgcaccactgcactggataatagtgagactctgtcccctaccaaaaaaaagcaaaactatatacagatataaagtagcagctctgttgctgatagaaggaacagtaatgaggagccctgcaggtcttattccactctttctagctgcaagctttcttcctggtggcagatgacatcatggattcatcccttacccgccggggacagatctgctggtatcagaaggtaatgtgggcaggaaaatagcagtgggtatggggacaggccacagggaggtggttatatatggcctggttgaggtgttggggtgatggctcttagtatgaaccgagactagagattgattgcttgtttttctgtctgtcatgacagccgggcgtgggtttggatgccatcaatgatgctaacctcctggaagcatgtatctaccgcctgctgaagctctattgccgggagcagccctattacctgaacctgatcgagctcttcctgcaggtgtattgcagacagggcccgatgcccagagggtgcccatggtagccttggcctctataggacatgctcatctagctggtttcagggtacaggattgcagcgtgcctggaagggaaagaaagcgaggaagggtgttgggaagtggggttgtggtagtggcaagaaagggcttctctgtcctgtgtaattggaagaaagggtgataaaggactgtgtgtatgaatatgggccttaagttttggggctttctccccttctgttgcctttctgattctgcccagttgtcagctggtatgggatgttgggcttgggataccagggtttcgcatatctggagaaagcctggctcatggaccgtctttgtcttgcttagagttcctatcagactgagattgggcagaccctggacctcctcacagccccccagggcaatgtggatcttgtcagattcactgaaaagaggtgaggggaggtgagggacagcgcgaaccatgtctggacagcgagggagggctcaggatgtgcattgccctcctgaggagtttctcttctccccttactcaggtacaaatctattgtcaagtacaagacagctttctactccttctaccttcctatagctgcagccatgtacatggtgagtgagcctcctcacccctctctgctctgctgatgggggcttttggacagcaaggcatagagcagaaaacgtgaacactgctacccctggtgaaaaactgtgtgaccttgagcaagtcggtctcgctcagtctctttcctcagctggggataaaattcctacttcacaggactgtaaagattaagcaaggcaagggatatgaaagtgcttagcacataataggggaacaatatatcctgtatctgagtatggataggagtgtggagatcatccaggttgagagggagaagagtggattaaagacagtcagtgggattaagtgtctaccctgaccttgcttctctacatttccttttcatcttgaaagaagttggaggtggcaaaaatattaggaaggtggatcagaatgacttggggactgacatttgtgagggaagagacaggctgtgcacctctagaatggattcatctcttttatgactcccaggaaggcctagccaaaaataagtgggattgaggttggaccatcagtcaggactgtctaggtcagggaagccaagatgtctgaagagagaggaaagatttggggctgcagtagggcaagaccccatgggaggaagcagccaggaagatgccggcacccctggggtttggcttattaacccccctttccctgcaggcaggaattgatggcgagaaggagcacgccaatgccaagaagatcctgctggagatgggggagttctttcagattcaggtaagaaggcaggaggcagtagcagagaacaggcaccagcttcactcctcctctgcccaggaacctcatccttcctcttttgctgccctccccctccctgcccaggatgattaccttgacctctttggggaccccagtgtgaccggcaaaattggcactgacatccaggacaacaaatgcagctggctggtggttcagtgtctgcaacgggccactccagaacagtaccagatcctgaaggtgcctgagagagggtggtgggtccctgagttggtggaaagggatagagcagtggttctcaactagaggcagttttcctcccgaggggacatttggcaatgtcagcagacattttttgccattgtcattacaactctgtgtgtgtgcatgtggtacagacatctagttggcaggagccaaagatgttgccaaacatgtagtacacagaacagctcccccagacaggattatctggtcccaaatttcaatagtgccaaggtggagaaaccctggagtagaggatgcctggtatgaggcaatatttgggatagggaagggaagcttgggattttagctacgtagagacacttgaaaattggagggaggaaaggagtgggtggctttggagatgttctggaatatgtgaatgaggggagtggaggggtcctggaggctctggggaaggccaagcccgttttcctgtctttcaacctcttccaggaaaattacgggcagaaggaggctgagaaagtggcccgggtgaaggcgctatatgaggagctggatctgccagcagtgttcttgcaatatgaggaagacagttacagccacattatggctctcattgaacagtacgcagcacccctgcccccagccgtctttctggggcttgcgcgcaaaatctacaagcggagaaagtgacctagagattgcaagggcggggagaggaggctctcaataaataatcgtgtaaccttcttgtggttctgttcttgctcggcccagccagagtctggctctttccagaatgtgcagggtggggtgctgggaggactcgctgcacggaaccaggacccaggggccaaaagcttaggatatatcaaaccctctaggtgggtgacaaaagacgctaaacgctgggggcgggtctgagctacgccacgcccatgcgcgaaggggtgcagctgcgcagcgcagggtaggttgtgctagtgcccctcccctcccgctctgtgccccgccgggcggggaccgtgggagccgcggacaagcccaaggccggagcggttccaggaggaccctggtgaggagggctcggcccatgggtgtagaccgatggacctgggcacgaggggcggggcaggacaagggagcaggagaaatgaatagagaaagggtgcggtggtggctgaacgatggagacgaatgcggagagaatggacataccgctgttccgaggggcgagggcgcaggctggagcccggccgaggcagccagcagatgcggagttgacaagctgacggctgctccatccttttcctctccagcccccacccctttcctgcattcaccagacaaactctgcgtattgccccacccccatcctccacctcctttcagggcatctgggtgggtctccctgggtcccttcctctgggagtaaggggtaggctggagggcagggccagattgcggcagcagggacctggaggtccattctgggcccggacctcttccaggcccccgccccccttcggagatccagagcgcagccgcgttctctgaccctcccggctccattcccggggggttacattcgactccatctgcaaacactgcagtggaaactaatggtcagtcgattgcgatttgcatctcattgaaatatcttccaaagcagccagagccttcaggcctgctgctgccgtcaagtcacctcggtgtccttccccgcagctcttgtcctcactggccgggcttcaccacctctgtcttctaggtctgcacctgtggttgccaggtaggtggatgtgagagaccctacccttctggttctctagaagccatcccatcgccgctagcatcatgctgtcccctcagagagctttactctgcaacctcaaccacatccacctccagcacgtctccctgggcctgcacttgtcccgccgtcctgagctacaggaggggcctttgagcacaccccctcctccaggagacactgggggcaaggagagcaggggcccctgcagtggcaccctggtggacgccaattccaacagcccagctgtgccctgccggtgctgccaggagcacggtccgggcctagaaaaccggcaggacccgtcacaggaggaagagggggctgcctctccctcagacccaggctgctcctcctcactcagctcctgctcagatcttagccccgatgagtcccctgtctcagtctacttgcgggacctccctggtgatgaggatgcccaccctcagcccagtatcatccccctggagcagggctccccactggcttcagcaggccctggcacctgctcaccggacagcttctgctgctctcctgattcctgctccggagcttcttcttcacccgatcctggcctggactcgaactgcaacgccctgaccacctgccaggacgtcccttccccaggcttggaggaagaggacgagagggcggagcaggatctccctacctctgagctcttagaggcggatgatgggaaaatcgacgctgggaaaacggagcccagttggaagattaacccaatttggaaaattgacacagagaaaactaaagctgaatggaaaaccactgaaaacaataacactggttggaaaaacaacgggaatgttaactctagctggaaaagtgaacctgaaaaattcgactctggttggaaaaccaacacaagaataactgattctggctcgaaaacagatgcagggaaaattgatggaggatggagaagtgacgtcagcgaggagccggtgccccaccggacaatcacgtccttccacgagctggcccagaagcgcaagcggggcccagggctgccccttgtcccgcaggcgaagaaagatcgcagtgactggctcatagtcttctcgcccgacaccgagctccccccctcggggtcgccgggcggctcctcggcacctcctcgggaagtcaccaccttcaaggaactccggtcccgaagccgggccccagccccgccagtcccgcctcgagaccccccagttggctgggctttggtcccgccccggcccccacccccgcctgtccctccccgaaggaagaagaaccgacctggactgcagcccatagcggaggggcagtccgaggagggccgggctgtcagcccagcggctggcgaggaggccccagccgcgaaggagccgggcgcgcaggccggcctggagggtaagaggtcgcaagaagcgggaggagggctgggcttcggccgctcacgcctcctaggcttccaacccggccccctgtcttccctccattctgtgtcacccatcctccccgccccttctaccagggagcgctccgggaaagggaaactgggtgggtcattgggttatgggactaactgtttgctccctcttcttcccgccccttcttgcctggctgcccatcccgctgccctccttccctctgcgcctggccccgccaatcccgcctgcagccggtcccctcctgctccctcggcccctggttttccggttctcggccgacgggcgccccctgttggagggtgggggcgcaggcgcagctgggtctctgctcctggctcctctggccgggtggcccggcgccgggctgcggctgctgggggcgccgagccccccagaggagcagctgctgcccgtccgcctgtccccggtgggagcctattcgcctccgactcggggagccttgccctgcctggccagccccgagctggcactgctgctgtccccgctctttcccagaagtagcaccttccccgccgcggctcccccaccccgccaggtacccgcccccccgctgccaccgcaacctcgtccgccgaaggcccctcgctggaccaggagcccatcgcctccgcccaggctacgtaagacggacccgggctagccccgcgggccacgcctcaggcgggccgccccgcccactctcgcccggccccgttttcgctttttttccggggttgcccagcttagtcccgcccttcagtttaagccgactccaagcaagtttgtcggccttggggagtctggccccgttcctagtgctggagggggaagttgttgcctttcctgctccgtgggccggccccctctccctccagacccacctgggcatagtggacgcgggcttacccagcctccatgccaagtctagggggtcccagcgagtctgttgttaggggctttgggtcacaccctctgtggaattccttggcctgtgcagctcgggcctgccccccgaccttgctagggaggggtggagggtgaagctcccgggagctcattggcactagaggttctggccacgccctctccgcgagtccagtcccacgcgggatgaagagggcaccctccgccaagaggctgctgcgggacccgggtttcccctttccggcgccttccagcctcccaatcctcgggtctcgcctccctccgtctcctccctttcccctgtctgtctttccattggtccatgccgcccacgtgctccccggggctccgcaggcaggactgggccccggggcggtgcgctgggctacacctccctccccgcgccccgtcctctcccgccctacaggccctagcagggcaggcgggaggtgagcgcggccatcccgctcccggagttccgggatcctggaggtgggggctgtgccctgagggagggcacagggaaccgggatggggctgggggacagcgagtgctgggaagtgtgcgagatttcactccggggctcgggtcgagctaccccgtgcttcaggcggtcctgcgcctcctctccccaagacccttcggggacacagcactgcagacccgccggagacaacttgtgcgggagcccggagtcctcggaataacacttggtaagtgttaccgcgcccttcttcccttacgccagtccgtagttcgtggtccttcgccggtgtccccggagcccagcggctgtggatggcagaagcccagagtgggactggtcagctgcaggagcagaagaaaggtagggcaccctgactcccgaccccgcgcttccgaataaactgcccttcgcccccggccctgctctcaggctgtccgaaggcagtctctccacgcccctcgggcaagcctgggtaggggcgcggcctcctagcgtcttccctttcccactcctcccaggtcttctgatagccgtcagcgtctccgttgataaaatcatctcgcatttcggggccgcccggaacttggtgcagaaggtgaaggtggctggggggaggctgttgggatgaggagagtaatggagctccgcggggggtgcgggaatggttggcgggaggtggctgggaggtgtctggagggatctctggagccatcggcatcgcgccacctccaggcccagttgggtgatagccggctgagcccggatgtggggcacctggtgctgaccaccctctgcccggccctccacgccctggtggcggacgggctgaagcctttccggaaggacctcatcaccgggcagcgcaggagcagcccctggagcgtggtggaggcgtcggtgaagccaggtgagccaggagggcgtgggacccggcagtgcgcagggcagggccgggcttggctgactgcaccccacgttctcaggctccagcacccgctcccttggaaccctgtatagccaggtcagccgtctagccccgctgagcagcagccgtagccgcttccatg

SEQ ID NO: 458 - DNA, 8050 bp, Homo sapiens
agcaatacaataatagtaggaaatttcaataccctactgtcaaaatggagagaatatccagacagaaaatcagtaaaaaagcagagaacttgaacaacaccatagaccaaatggaccttacagacatatatgcagagccttccacccaacagcagcacaatacacattcttctcaagcacacatggaacagtctttaggacagatcacatgttaggttataaaacgaatctcaataaatttaagaagattgaaatcacaccaggtatcttttcaactatatggaatgaaaccggaaatcaatagctgaaggaaaattagaaaattcacacatatgtggaaatcaagcaacacatttttgaacaaccaagggttaaagaataagtcaggccggatgcaatggctcatgcctataatcccaacactttgggaggctgaagcaggaatcgcttgaacctggtagtgcgaggctgtaataagctaatgaggtgccagtgcactccagtctgggcaacagaatgagaccctatctctaaaaaaaatttttaaaagaataagtcaaaaagaaaactagaacatatcttgagaccaaatgaaaatgaaactacaacatacctaaacttatgagatgcagcaaaagcaattctaagaggaaaatttatagtagtaaactctatattaaaaaaaaaaactctcaagttacctaactttacacctcaaggaactagaatacttgtttactgaaaagtataaaacattgctgaaagaagttaaaaacaaataaatggaaagacatcccatgttcatatgttggaagaactaatattgttaaaatgtccatactaaccaaaatgatccacagattctgtgcaatccctatcaaaatcctgatgctgttttttgcagaaatagggtgggagaattctaaaattcatatagaatcacaaaggaccccaaatagccaaaaacaatcttgagaaagaacaacaaagctaaaggtctcacatttcctgacttcaacatatactacgaagttaaagtaattaaaacagtatggtactggcataaagctagatatatagaccaatggaaaagaatgaagagcccagaaataaaccccacatttacaatcaaatgatcatcaataagggtgccaagactacataatgggggaaagatagcctcttcaataaatggtgttgggaaaactagatatccacatgcaaaagaatgaaattggacccttattttaagcatacacaaaaatcaactaaaaattgattgaagacttaaatgtaaggcctgaaacgataaaattcctagaaagaaacaaacgggaaaagcttcataacactggtcttgccaatgatttcttggatatgacagagaaagcacagacaacaaaagcaaaaatagacaaatgagattgcataaaatttaaaagcatctatgcagcaaatcaaacaatccacagagtgaaaaggtcaccaatggagtgggaaaaatatctgcaaaccgtatatctcataagaagttaatatccagaatacataaggaacttttacaactcaaagcaaaagcaacaacaacaacaaacttgattttaaaatgggcaaaacacctgagtagacatttctctaaagaagacatacaaaggccaacaggcataggaaaacatcatgtgctcaacatcaatcatcaagtaaatgcaaagcaaaagcacaatgagatatcactttactcctgacaggatggtcattattttttaaaaaaagaagaaagaaaaagaaaataacaagtgttggcaaggatgtgcagaaactggaactcctgtgcactgggttggtgggaatgtaaaatgatgcagctgctatggaacacagtatggtggttattcaacaagttaaaaatggaattaccatgtaatccagcaatcccacttctgttcaaaagaactgaaaatagaatcttgaagaaatgtttgcacaccaatgttcagggaagcattattcaaaatagccaagaggtagaaacaatctacaagcttactgatggatggataaaaacagtgtggtgtatacataaaatggaatattataaagccttaaaaaggaagaaaatcctgtcacatgttacaacatagatggactttgaggacataattctaagtaaaataagcccatgatagaagattaaatactgcatgattccacttatgggatatctaaagtagtcaaactcatggaaccaggaaatattaacagaatgacactttccaggggtgggggtaggggaaatggggttctgttcaatgggtgtagttttcgtgatgcaagatgaaaaagttctagagacctgctgtacagtaacgtacatacagttaacagtactgtaccatactcttaaacatttgttacacacacacacacaacacacacacacacacacacacacacacacacacaaatgctatcccagaaacccgtaccacttcccaagcttggtggaaaaaccacccagtgtttgtgacaaagaccaagcccttgggttcaatcttacaaaatgtcattagaagtcagaaagaaaatttatttgggccatccactcctcattactttaggatgtacttttaaaaaaaacctgcattttgtaactacagcaaaagcattttctgctcctaaataagacaagtcaattttgtgtgtgtgtgtgtgtgtgtgtgtgtgtgtgtgtgtgtgtgtgtgtgtgtgttttaaggctccccgggtaaccgtgatgctgaccagctttaggaaccactgtcaatgaaagcagacatagtacaaggtctaggaagccccaggttacgtgtatataggaagaaatatatcaggtgaagccttaccagtcccctgccaggggcctgcctttgctctggcgttgggagtctgcacacagaatgtggaacttggaacgcacgctggaacctggcactgttgcttccttctttgtacagatgacccttgcagtctgaccaggcagcttgaatccaaagagccaggctgtcactggggaaggctggccaagtctgccaagaggaggctaaaagggatttccttggcacccggggccatgacgggggttatccttgcacactcagaatctcagttaagttggcacatggtagcctttagctctggggcgggctcaccttaacaggtatgcatggtgacccaggcagccagtttgctaatttactaatgaaaaatacagctgtcatgttggcggatcatggtctcctttccctctatgtgagttgcacgtgaagccaaatctgaaggttgtttaataagaaaccagcacaagcaaaattcaccagatggtctttaagagagccacacccacaacaggggatgctgtgttccagctcatgagggagggcatcctcttcatgcccagacagggcctaatgggcatcaccagcttccacggtgtcggcgtggactctgcagtcagactgacggaattcagatcctggttctgcacttaccatttgtacgactttggcaaagcagtatacccctcaagccctcagtttcttcatctgtataataaaaataatagcagctacatcattggattattgtaaggattaaatgaaagaagtgagacgtttaacacaatgttaggcatggttaatcttcatgtctggtagttattattatcatcatgaccactactactattattgtcctcgtctcctctgatttaggcctcactcttcatcatagttgttctgtgtgtacaggatacctatgaatgattaggtttccactcactaaagtggaaacatattctagtcttgcctgtttgtaataaacttagcagccctgcctggagttggtgaccctcctctccacaacacttcatggtacctttgcccacagtctcaggtgaccagtcatatcctttgtgatggtggtggaagctcctgaatcccaggattctgaactggggatgaggtggaagtcatctcacagcctgtcacacatccttgtgcctgaatctgcatcctgagttcttgtgtcccctccctgcactcccacttctaaatagctcattagtgctgggacatgaaggcagctgcagggcagggcagggttaaaaggcagggattgagcaagtccctctgcaggaaagcgtgtgcccatgtaatgtgtctagcagatgtaacttctcgtctgtctgggatggagattatgagcccacatgggcctgtgacttgagcaaaacaacaaaacaaaccaagaaatgtgaaacgcacatgcctgtccttatacgagggctcagacacttctaccctgctgaagcaggtggatgctctaagtggcacccactccgcctgtgctggggacagcagaaggggccctccaagccagactcggctctcgtgaacccttcacgactggggcctccccgctaaaacagcctcattcccacttaacagctttggctcatgctgttgtcttggctataatgcttccctccacttaataaatcctgcccatatattcaggcccagtttaagccccaccactccttgatctctggactcctcctccaaatgacagcatggtctgttttccagatacaattcagagctggattcggtgtttgtttttccagttatttttgcttcctctaggaaacttctttgaaaatgagactctccttccctagcaggggctgggtgcagataggtgttcatttaacgtggattgattggattaagggcttggggatggaagggaggcttttttttttcttttttgcctttttcaaaattatgaaatacaaaatgcagtcagacaagtacatgaaacggcaatgtctggcttaatgaatattacgaggcaaatatcctgtaaccaccatccagatcaagagaacattaccagcatcccagaagcctctccatatgacctttgggaagcagacatttccaaactggtgattgtatatctgtgggcgtgggaaaggtctttatttcatttttagaaatgggtctcaccattttgctgaggccgatatcaaattcttgggctcaagcaatcctcccaccttggcctcccaaagtgctgggattatggccatgggctaccatgcctggcctgggaaggatctttagaggaagtgtgagctgggaaatctcttcttgggcccttgcccacatgagcttgtgagtatcttggggaagtaccaaatccacagcaccatgagagggaggaggcagccgcagggagttcttggtgggcaaaatatgtctgtcaacctggagccctgcccagaccctgaagcaactgttcttcattccagctgggatttgtaagcaaatatgaggtcagatgtgtctgggtgtgtgcttcctacccctagccaaaagggaagcaggaccaaacgtgggcctccagacacttagagattgcagactgaggaaggaggagaaggggctttccagagcttggagcacagggcaacttacagggcccaggaagtgggtgagaaaatgtagagaagtaatgactcctttgggggattttaaatattgagtatgtggaagtggggcatcccctcttctgtctttctttcttctctttttctttttctttgagacagagtctcactctgtcgcccagactggagtgcagtggtgcgatcttggctcactgcaacctctgcctcctgggttcaagcgattctcctgcctcagcctcccgagtagttgggactacaggtgcatgccaccacacccggctaattttttgtatttttagtagaggcggagtttcactgtgttagccaggatggtctcgatctcctgacctcgtgatccacccgcctcagcctcccaaagtgctgggattacaggtgtgagccactgcgccaggccctgtctttcaaaaagtattttttggctgggtgaggtggcttatgcctgtaatcccaacattttgggaggcagaggtagaggattgcttgagcccaggagttcacagtgggcatcacagtgggaccacatctctacaaatttttttttttaattagccaggaatgatggtgtgcgcctgtggtcctagctacgtgggaggctgaagtgggaggattgcttgagaggtcgaggttgcagtgaaccaagaccgtgccattgcactccagcctgggcgacagacggagactctgtctccaaaaaaaaaaaaaggataatggcagaacgtgcaggtttgttacacaggtatacgtgtgtcatagtggtttgctgcacttattgacccatcctgtaagtttcctcccctaacccccaccccccaaaaagccctggtgtgtgatgttcccctccctgtgtccatgtgttctcaatgttcaacttccactatgagtgagaacatgcagtgtttggttttctattcctgcattactttgctgaggatgatggcttccagcttcatccatgcccctgtaaaggatatgatctcattcctttttatggctgcatagtattccatggtgtgtatgtactacattttctttatccaatctatcactgatgggcatttgggttggttccaagtctttgctttataattagtgctgcaataaacatacatgtgcatgtgtctttatagtagaatgatttataatcttttgggtatatacccagtaattgaattgctgggtcaaatgctatttctggttctagatccttgaggaattgccacactgtcttcttacaatggttgaactaattgacattcccaccaacagtgtaaaagtgttcctatttctctacggcctcactggcatctattgtttcctgactttttaataattgcgattctgactggcatgagatggtatctcattgtggttttgatttgcatttctttgaagatcagtgatattcagctttttttcatatgttcattggccatgtaaatgtcttcttttgagaaatgtctgttcatatcctttgcccactttttgatgtttttttttaattgtaaatatgtttaagttcctcgtaaattctggatattagacctttgtcaggtgagtagattgaaaaaattttctcccattctgtaggttgcctgttcactctgatgatagtttcttttgctgtgcagaagctctttagtttaattagatcccatttgtgaattttggctcttgttgcaattgcttttggcatttttgtcatgaagtctttgcccattcctatgtcctaaattgtattgcctaggttttcttctagggtttttatggtttggggttttacatttaagtctttaatccatctcaagttaatttttacataaggtgtaaggaaggggtccagtttcagttttctgcatatggctagtcagttttcccagcatcacttactgaataggagatcctttccccattgcttgtttttgtcaggtttttcgaagatcagatggttgtagatgtgcgatgttatttctgaggtctctgctccattggcctatatgtctgttttggtaccagtaccatgccgttttggttactgtagccttgtagcatagtttgaagtcaggtagtgtgatgcctccagcttggttctttttgcttaggattatcttggctatatggggtcttctttgattccatataaaatttaaaatagtttttttttaattctgtgaagaatgtcaatggtagtttaatgggaatagcactgaatctataaattactttgggcagtatgggcattttcatgatattgattcttcctatccatgagaatggaatgtttttccatttgtttgtgtcctctcttattccttgagcagtggtttgtagttttccttgaagaggtccttcacatcccttgttagctgtgttcctaggtattttattctctttgtagcgattgtgaatgggagttcattcatgatttggctctctgcttgcctattgttagtgtaaaggaatacttgtgtttttgcacattgattttgtatcctgagattttgctgaagttgcttatca

SEQ ID NO: 459 - DNA, 8050 bp, Homo sapiens
agatttatgatgattattaataccgtggacttctcttcaccatcttattttgctttctatttcccatgcttttgtcttcattttttcattttttttttggtggatcgttaaggttttctttgttccagttaatttcctcttgcggtttgcccagttcacagccatgctccacttgtggcaaatcaaaaaggtctccacacattgccaggtgtcccctggggagcaagtggtccctgtggaaagccgctgcactaggtgagcccggccctggtgagggtgccttgtgagtggagcctgcttgtgctgctgtgccccgctgcttccaggcggcgcggccctccgtctgattgctggaggactcttcggtgtggacacaccgtggtttgtttacccatcctggtcaatggacaattggaactgtggtgaacaagcattcctgcacctgtatgtggatattgtatgtccatttttcttgggagtggaatggctgagtcatctggtaggtgtctttaccttttaaagaactaagcgctttttccagaaggatcatcagaactgctgccagcaagagtccaggtatcccggctccaccagcatgtggtggcggcctcttgacttggaactgttcttctgggtgccggggttctccagagaaacagagccagtggcacccacatgtgtgtgtgcgcacgcgtgtgtgggagtgtgcgtgcgtgcacgtgcgcacgcgtgcgtgtaaggagctgtgtcacaaagaattggctggtgcagttatcaaagctaagtcccgagccggagacccaggagagctgaaatgtagttccagtctcagtctcaaggcctgagaaccaagagggctgacagtagcagttttaacccggaagctgtcgggcgggcgggagatccaagaagagccagggttttagtccaagtgcaaaggccagaaaagaccatgccccgcccacaggaggaattccttcttacccagccttgcctttcccttcaggtcctcagcagattgggcagggcccctccccaacggggaaggctgtgggctttcctcagtttacccattcagatattaatcccatcccagaatgctctcacagtcacacccagaataatacttggccaaatgtttgttggggaacctggcagcgtcaaatggacccataaaattcaccatcgcgctttccgctgtggtctaatttgcatttccctgatgactcatgatgttgcacgtcttcctggagattacctgcccttcatagaacttctctgtgatgttcctgttcaaaccttttccccattaaaaaaatgggattgctaaccgggcgaggtggcaggcacctgtagtcctagctactcaggaggctgaggcaggacaatcacttgatcccgggaggcggaggttgcagtgagccgagatcacgctattgcactccagcctgggtgatggagtgagactgtgtctcaagaaaaaagaaaagaaaagtgggttggggggcttgcttgtcgtaatactgaggctgcaggagttggctgtattccagatggaagccctttgtcagctgtgctgtgaaggccttctcccagtccatggctcgtgttcttaactttcttacattgttttctgaagagcagaagttttaattttgataaggttcagaggatggatttttcttttacagttggtacattttgtatccttctaagaaattgttgcctgtctcaaggatgcaaagattttctcccttgtttccttctaaggagtttcacagtttgagcttttgtgtttaggtccgtgatccattcggaggcacttttcatgggatgtgaggtttgggttgagggccatcccttccctgtcctggctgttgcagagactgtccttcgcctcagttgccttggccccttggctgtatgtaaatggaccctgcctgtgggtctttttctgggttccccaccctgtattgacccctgcatccattcctagaccagtgctgtactggcttcagcactctagctttatgagaagtctggcagtcaggtgccatttatcaaaattcattagaatttttgttaacattttttaatttaaaaagatactgttatatatgtatacaatttgccatcaaccattttatacagcaaccactttatccatttatagcgtagacaccgttccgtaagcacacagtacagtcataccatctatatcaccatgaccctctcatcttgcaaaccggaaactccatagccattgaacaaaactgcctcctccccaccccagcccctgggatccaccattctgctttatgtgtctaagagttggactgtgtgagatacctcatacaagcagagttagcagatttgtcttttcatggttgacttatttcacttagcataatgtcttcaaggttcacccatgttacagtgagtgagaggattgccttcttttaaaaggctgaatactgttccactgtgtattgtgttacttgtccccagggggacggaactcataatatatagaggtagatgaggggatttattggggaactggcttgtgtgattacagaggctgagtcccgcagcagacctgcaccccagagaccctgggaagctggtgcgtggctcagtccaaagccaaaggcctgagaaccctggggggatgctggtgtaagtcccaacatccaaaggccagagaccctggagttctgatgccaaagggcaggatcccagctccaggagggacaggaaattgcttatcctctgactttcttgttctgtctgggccccagcggactggatggcaccacctacctggaggacatcttcccactcacccaccagtctcctctggaaacacccgcacaggcacacccagaagtaatgcttcacaggttctctaggtatcccaaatcccatcaagttgatgcctgaaatgaaccattacctgtgcagatacggtcatgtgtcacttacatggaaaaactctcagaaatgcatcgttaggcgactttgcggtgtgaacatcgtggaatgaactaacaggagccagatggtgtggctgctgcacgcccgcaccgtggtacagcctgtggctcctgggctgcaaacctgtacagcatgtcactgcactgaatactgcaggcagctgttccacggtggtgttttgcatggaacacatcgaaacatagaaaaggtgcagtgagaatgcagtatcctaatcttaatgggaccactatcacctgcacggtctgttgttgaccaaaatgtcgttatgtggtgtgtgactgccacgttttctttcttcattcccctggtgatggacatgtgggtggcttctgcctcgtggctgccatgaacacaggtgtgcagatacctcctgggaccctgccttcagttctcgtggcctactggggactcaggagccttgtgcctaacgttctgaggaattgcctcgctgctctacacgctgcgccgggcacgttccctggcactgcacgcgtgtcccgctgctccgcttcctgccgtggcatagctttcggtgttgagtgatcgccgtcctaacgggcacgaggtgatgcctcacgtctgcacttgtgtctcctgagcagtggttggtcgtgtggagcatcttgtcatgtgccgcttggccattggtttatcttctctgtacaagtgtctaagtccttcacccattttaaaattggatatttcctttggttgtggagttgtaggcgtttttaaaagtgcattctggatagtagctccatatgcagatccctgggttgcagctattttttcccattttttactctgttggtttttcctgctctgcagtttttaagtttgatgtagtcccatttgtctctttctgttgcctgtgctattaggaatctatttttaatgctttgccccttttcactgttcttcctatgatacggtctgtgaggttgcctgtcctcatttgggcgagctgtatcttctgcgggctcatctctgcagtgctgtttcttgtgtcttagaatctgctggcccctctctgcattgctgtttcttgtgtcttacattgtctttgtccacggatttattgtgtttgatcactaagcaatatttctgagtagtttttctgccaggaaggtttgtgtgtgctcagctttcagcccttgcgtatctgaaagtaacttcagtttgtcctcattcttgagtgataatttggctcgagttagagtctttagcatttctgaaattccactcactcggtcaccaaatgccctttaaggagcctgtgaaggggctcttgctaaccagccagcccaggccagtggaggggagcttttagggcccggagtcacgtgctgagtcccccggaagaggaggcggtgctttccggggctggcctggctcctctggggggcgtggatgtggggaggagctgctgtctgggtcagcagctgccctgctggagggagagggggtgctgcgctcatcccctgaactcagattggatagccccgggccagcgctggaggaggagcagaggcagggaggtgggaggagcgtgcgcagaggcgtgggaggcctgaggagtaagcggctggatgtggaccctgagagccactggcagggaggtggggtcttccagttgtgaagacaccgtggccccggtgagcccctccccggcctccttcatgcctgcgttctgcgtaaccgtggcgcgttctgggcagggccttttcccttgcactgggagcaaagggttcctgtctgcagcacaccagctgcccggagctctgccctgtgcctgagcagcgtcagcaccgcggtgaggcggacggcccggcaggggttggaaagtccagaaaggccccgttcccgcgtagaacttgaatgcagctaagggacgtccagagaggcctttccttttctggtggcggtctggaatgtgctggtgtgcggatgctgtgtgggttcctccgcgcgagcgagggtggttgtgccgctttgtctaatggtctaatggcgaagactttctgtcctgctcttgtgaggcgcctgcacaggcagagcaaagactgagtatatgccttgcgtcctttagaaattccacctcgtggcaggacacactcagatagggtctccagtgggagagtcctgcaggccggtgtcgggctgtggtgtcagggcctcgggggggccttccccagtgggtctcgttgagctcgcttgcactggtcaggtatttatggagagctgaagtgctgtctgctgtgacttcccatccactagatgtagagcagacgaaaagaatctttcccgtctttcctaagcagtgccgaatccttgggagaaatcttgaaggcaggcagtgtggatgatgggaccccaggctgcgtggcaccagcaagcttggttccagatgccacacacggtgcctggcttcgagtccgtctcctgttgtcactgctttgtgagttggttaagcgtgttgtgtcttgatagcttccctgccctccttctcaacatcctgactcatttgctcaccagcaagggtgagtcctgctcggtagcagacggtgatgctggctgccatttgcaaagcctcctgtgtggctgtctggtgtggacgagagcgtgtgcaccctgtcacccgcggtgggtccacgtcggcgctgggggatgtctgagtggagggcagctggggccaggccgagtggggagtggcagccgggggaacgggctcagggccggccttgccacccgcctcctgcccctgctttcggggggaaagtgagtctagggaagagccctgctgtgtggctccttcctcggctgaggccagtcctgtctctgttgccctggctgtccctacttctgggaagcccaagcgctgagctgcgtccaggtctccctcactgcagccctgccttcctcacgtggcctcacggctaagcacagtggctgacacgaggtcgaggcgtgcccagggccgggggagcaggcggtacccgagagtctgtcctcccatggttgggcacggctggagaggaggcgaggtggagcgcttgttctggcacagctgcgacggcagagttgggcccactgctcttgggcggcagcacggccgtgttgctgatgcgctgtgtggtgagctgccggccaccagtgcagccaggaccgcaggtggtgtttcctgcgggagcccggccacggaggccggggagcgctggggcgtgattctgtcgtgccgctttcaaaccgtagagcacaggaaacgggcggagaagaactcagcagcgcttctctcagagggacagaaaactaacaacgactttaagattctccttgattggcttatttccacagggaatggatggttcttacgactggggaaggcaaacgctgtcacacaggagaggtgtgggtcgtgcacttgtggcttcccgtgcgtgtgtgaggcttgctgtgcccaaccccagcccgtgtggagcccacgccccatgcacccttgtccctgcccggcctggcctcgtgtggtggcgcctgcagccgcagcagcctggctgatcaccggccaggcctgtgttttaccgtctgatagcctcacaccccggtcactcctctcctgtttggaaatttctttaactgttcgttattctggatgaactttgggattattttgtcaacatacacgtacaatgtttttggcaaaaattggggttgcttctcatccagggatgtggagtggctctccgttcagcagggcttttgtgggtcttggttgaggtttagagtagatacttttgagaccatgaaccttctgagacttctgcctctacaagtgccatgaggagacctggtgtgtcctgggtgtggggctggtggggctcacaccaggggagcagatccctcaccatcctccttcctctccaggtgccctacgagacgctgaacaaacgctttcgcgccgctcagaagaacattgaccgggagaccagccacgtcaccatggtggtggccgagctggagaagacgttgagcggctgccccgccgtggactccgtggtcagcctgctggacggcgtggtggagaagctcagcgtcctcaagaggaaggttggtcccgcctggcggtccctcttcagtctggggcatggacaccccttttgtctcgaaaatgagtcctaagacaggcaagctgcaatgatgggaacgcgggaggtgcggttgggggcccccttccctgctgtctgccttctggggccactgtcggctgagcaggccagcttcctgttcctgtagggaccgtgttgtcttgctccaggagtgtccagagtccaggccacagggagaccaggatgtatagcaggttgattgattttttttttttttttttttttttgagacagagtcccactgtgtcattcaggctggagttcagtggtgcgatctcagctcactgcagcctccacctccggggttcaggcgattctcctgcctcagcctcacgagtagctgggactacaggcgcccaccaccacgcccgtctaatttttgtattgttagtagagacagggtttcaccatgttagccaggctggtctcgaactcctgacctcaggtgattcacctgccttggcctcccaaagctgaaattacaggtgtaagccactgcacgcggcctgatcgattatttttagatggaatttcacctccaaggagcatgtggagttccttgtcactgggattggtggacaggggccttgggactaatctggcccactgaagacacccagaaagtgggatgagatatcttgaaacgtcgcactgaaaatacccaataaaccatgaaaccgaaaggaatcgccaggccagaaccggagggcaggggtcagaggtgagcagcaagagactgctgttgtcccctggagtgttggccaggccagatggaggtgaggaccgatgacccaagccttggaaagtggggcccagtggagagaaggtgggaccccacggtactacagctcagcgtggggtgtaccaga

SEQ ID NO: 460 - DNA, 8050 bp, Homo sapiens
tcacttgaggccaggagttggagaccagccccaccaacatagcaaaacccggtttctaccaaaaatacaagaagattagccgggtgtggtggtgcatgcctgtaatcccagctactcgggaggctgagtcacaagaattacttgaacccaggaggcagaggttgccgtgagccgaaatcgtgccaatgcactccagcctgggtttcaatgggagattgtataaaaaaaaaaataaaaaaataaaaaagttaccactgtgaataggttgaccaacataaagacactgctaggtaacagtctgcctctctagatccgcttaaggctcttcagtcagcactgcgctgcaagaagcaacctgtatggactgcactggagagctacttttgctcccaggcttctgattgagtttagacactgaaagacaacagctgttcagagatatggattagtaatttattaccttgttttgtttcacctagacctcagggtactgaaatattttatctgaagtaaaaaataggctggctgtggtgattcacacctgcaaccacagcactttgggaggccgaggcaggaggattacttgaggccaggagttcaaaaccatcttgggtaatagaaagataagccatctccacacacacacatacatacacacacacacacacacacacacacacacacacagtagccaggcatggtggcacatacctgtagtcccagctacttatgaggctgagaagggaggactgcatgacccaggatggttgaggctgcagtgagctatgcttgtgccactgcactccagcctgggggacacagccagaccctgtctcaaaaaaagtgaaaaaaaaaaaaaagccaaaaaatactgtggagtggccctttcttcaagcatctgcttgctttctctaacaccactcattctattgcccctactgagcttgaaatgataatgctttcttcaggtgccaggtctggagtgctggtgcacctatctcaaaacgctgtctcaaaactccaacagggagcacctaacggtactgggtgcaacattgctagcacggagcaaacagcagtccagtaacctggaacaacaggctctgcgaaaccaaggactctgacaaagaaaaattgccaattccaaacatagcctgttttagagaaatgaatggcgttgtcatcgaaaaaacacagactcgattgtgacagaaataccgccacaaacgcaggtacagggacagccgacaccgagaaccaagggaagcggctgagagctgcgcctccacggaataactgccagccggcacagtgcgagtgagaaaccggccactccatgaaacgaccagtactgccacggaaaagaatccgacgtcgccaacaagcggtgctaccaggagaaacgcctgcttttgaagaaaacagccaggaacgcgactgaaagacacttgctcccaggaagaattggcatttgttccaaaacacagctggataaaccgagaaccttcggagtggttgcaccgaaacggggtcacccagcacctcagcgtcctgggctctagcaagcctcacagaagcaaccggcagtgctaacaccgaggagcacctagagcggcaaaactagcagtaatgccatcgacgaaaggccagttaggccaaaagaatagaatatttagttccgggaattacaggccagcgcaaaccagacagcataaagctgagggtcagcaaaacaaaaattaggaacaatttttttttaaagggcaagttagctgaaaaacacacgcacacacaataaaaacaatacatttgggaagattcatcaaatgaaaattcaaaactaagcaaaacatggaaaaatggactctacaaagaagaaaatgcaaacacttctaaacaatgtggtttcacagaggtaatatcgctgtcaggcctatatcagtatctgctcggtctcaccaggacttctaactaagggactgcagacactgctaaaccgctacttgctactcctaaaatatcttcttcacctacgtgcccggacttctatatttaaaactcaggcataagtaaagcagggtaagttattatgaaaccgaaagttactgggactaaggagtcgcaggcatggctatgctagtactggttgcgaccaaatatggacttgcaagagctaagaaatcacattcacaggggcacttaaaatcgaagcatgcacttgttactctaagaaatccctaacccaggactcgctcagaatatttcgaacgcagaattaagcatctttatcgcaggcgaaataagccgatacttattccgcttaagtccgaacttgctatgcagagaaaccacaatcagggctacattccgagtgtaggaggtttaaaactcccgaaaaggcagtcaaagcaggcagggccaagccggacctgctgtgcctacccgaattgctaaacccagttgtggtaccattaagtaactggtagttctcttataagccaagctaaactgttccaaagaaaaagacgctggaaacactgctagccctgagacccatgaataagtagtcttttcaattatttatttattttgagacaggctctcgctctgctggagggcgttggtgctatccggctcaccgcagcctcgacctcctgagctcaagcaacccgcccaccccagcctccggagcagctgggactacaggtgcacaccatctcacagggctaacttttgcattttttgtagacacaggcctcaccctgtcgcccaggcttttctcaaactcctgagctcaagcaatccgcatgcctccgctgctgaaagtgctgggattactgccgtgagccacgctgccccgccagaataagtaatcttaagaactggtcatctgtgaagttgtattaatataagtaattgcgtggtccttccacgagaaatagcaaagattgataaacctctcagtcttatgatcgtgaataaaattcctgagtgtaaaacaatgaatcgatatactgaaaaaaagaaagaccgctgttaaaaataaaattaacaattaaaattaaaaagacgttataataacgtaaaagacatgatataaaattaaatgtaaacaaacaatacatttaaaaagcaataattagaaaaatagtaggaataagattttaaaatacaatggaaaaaaacaaattttaaatttgccaaaaactctaagaattctacaatcgtaaaatagatttctcaaagtgaaaacagatacgaatgaaatatttaatgaaataaatacaaatatttaaaatacaaggaaactgaaagtaataagcgacgcgaaacaagaaagaaacataagggaaaaagagaatttaaaaactgacaaccagcaatgaaagcacatcttaatgtatttttattttctaggtggagacgtttggtaactgagaatcttttcaaggaggagaatccaaaaagccttctgctgctatctaaggctgcttagctccacagatccgtgaacagcacgcccagagtacagagaacgcggcaaaaccaacgcgaagaatccactccaggcagtctgagaaacccgggaggtggcgccacggctggagggcaggaggatggcggcgttccaaaaggcacccgctgtcacagacctcggtgtcctgctgtctgtcccagggatggagaggactgctccagggaagctgctggagcctgagtctgtcgggttcctctgcctgccccacctcttctacgggtgcctcttgctgcttctgtgtccccggccaactgaactcagtgggcttcgctgtacttggttccaaggtgctctggactccaggagagagtccgttttgccagtagactccgggcagccgccagcaagggctggaaagcagtcccaaatcacagctgtccagtgagtactctcctagtactggatacaaaggaagaggccacggcccacgatcttctgaactcacaataggtggaggctggggctctggcgccacctctgcggaatcccaagcccgcttcacacagccaagaaaatgttgctccatccctcaagcctcagaccaacgtttgcgctgatcaaggagggagagtctctgcactaccatcagcctgagtatttatgctctgcagagcccgtgggcggaggccagtcagatattaagaaactcagtagtaacaaatgcacgaaaattagtagacaaatgaaaaacgataacattttagagagtacatagaaccaaaacgaaccgtaattccgacagaaaaacatggcgagaaaagaaaccgaaatgaaatgacactaagcaaatcttgaagagaactagcgctacagaacgcaggtattcaagagcgcgcaagggccaagaaccacccgtttccgggaaatgagcgttgctgccaccggaaaactgtctgctagggctctgccctaaccaccttgcaaacgagaaactggcgcgttgaacttagcaagcgccggcacctagcggatagcgctggtattgccaaacaaatatccgttttggcgccgtaaagggtgctgctaaagagaaacagcatgctcttagaactaagagcggtgcttccacacctaaacaacctgtttggaggaatgaaccaactctgtttcaatgtgttgtaccagaaaaatgtgttgcggcatttaatgtgttttaatccgttcaatgtgtttgataggtttaatatgttttaacccgttttaatgggttgtgacagaaaaagcgccggctaatggtaccacacaattactagtgcgaacagcggctcggtgcaatcaccgttctgcacggcaaaacggggttcaggaagttcctaggagatactagcggttgtaggagcgaaaaagtgacagcactgagaacctaaggaccccgcgaacgggaaatgtcacgttgggtgcagcaactgagaaaacgcccagtgggcgccactggcaaacgtgctgatacaaaaccgccagctctgcataggaagcggagcctccagacagaacccggaacctgataccagcgaggctaagaccgagctcggctccccggctcctgagagaatgaaagtcaagaagcacgaatctgagacgctcaaaattagaagaaaaaaaaaatacataatttaaaataatgaaagtctgaaatgcaagtaaaaatgaaaaacacatcggtaacattgtcctcagagcaagacacaaaaataattttaaggtaagcaaaagttacagagaaccaaccctacaaagaagaaattacaaatatggctaagcgatgcaatgcctaccattagaatatttctgtcagatctaaacccctgcaggttgctcctgtcataatttcctacgagaaaaaaaacaaaaatatccacggttaaacgtgtttagctacgtctaaaaaatcgtagtagctggtacatcccgatttggtctacaagaggaaaaagtctcgatgggcaggacttgctattgtcaaagggagcttggtaaaactgagacatcgcgatcgccggcatttcctgacttccacgggagttttaaaaacacacaagcatagctaagacaggactcgatattgcgaaaccaaacttggtataagagctcccaacactgctaaactggtcatcgctaaacctttaaaaaaaaaaaaaaagcattcgctggtacccagatttccacaggagttaaacatttcctgcgcagctaaagcaagtcttaccagtaggaaaccggaacttgctaggactaagaaacttgaggctaggctgaccccatggttgttatgattagaaatccgaggccactggaaacccggagctgctgaccaacgagtcacagggtaacttcgccttcgcatggggaaacgggtgagttcctacggcctagatatcgcagccagggctagaccggtgtttgtcttaagtcaggacttgcttgggctgagaaaatacattttggctattcccctacttggacagagggtggaaatcccaggcaccgcgaaatcgaaacttgctaggactaagaagccaacgacgcgcgaaaccgtggggtcctgcgacagagacgccggcggcgccgccacaggactgcgttctggaggccgagccggaacccgtgcggcggcgctgggaagagactgtgcccctgcagctcccctgtcaccggctccaaggagcgtcgggctccccccgcccagccctgcagcacccatccggcaacgccagactcggcgcaacgggggcagctgcgactttaaatctctcagatccgcggcctgagggctgccgccaccgagaaatggaggcacagagctgtgaacaagagaccacggctcgccgaaatggcggtgccaggagcctgaaagggaatgcagccggcggggttgtcaaggacaacatttgttttggcgcaaccagcggtgccgtcaccaagaaaccgtcgactctgagaaaaaaagagaagttcggctaccgagaaactccgtgcagcaagtgctgtgacagcaaaaccgccggcttcgcgccgctggcgaaagagccaacggaaacgccgggtgctgcgaccgcgaagccggcactagagggcctcggatggagaaagccccgcaccgagacgaggaaactgtgcacagcacgactagcagttgacacaaacagaaaagtgtctcgtctgctctctgggagaaagcgtggatcaaaaccagcaactcagtggagagaaccccgcagccactgaagaagttgcccacgtggcggtggggccagagaaacaccgcgatttcgacgacagccgtagggataccacagagaaacatgcgcggccacagaagtacatccagctccgcgcaatcagtggttctgcgatccagaaaccgccagctgggctagactagaaacttctaaaaaactgtcgtcccatagcagctttcctaaccacgacagacagtcgcctttagagagcacctaacggtgctgagaccggcctgggccagcaaaagcgcagagcggtgccagtgccaagaaacgcccgacttggtgaaaccaaccttgtgaccaccgattccactggcttcgcaggacgcaacgggcgaaggcgcggcggagaaaccgcaggctcccttcaccgattatgctgcgggctggggatggtggggggcacccgcgaaattgtgaaaccagcggcgctgggacccagcgatcagctgcccgtagcaaatgtctgtgcagttgcaaaagataatttttggccgtgagaaggttgccgccagagagcgtccgataacgctgacaaaggcgtggcgttgccagtgagaaacagccggcgctgggaaaggaacggtgcagcgaccgaccaactgcgcgctcggtgccaccaaagtgctactggctctacccactctgtcccccacgggcttagggaagtctgatgtctttttcttttcttttttcctctgtcgcctaggctggtgcagtggtgtcatcttggctcagtgcagcctcgacttcctgggatccagcgatcctcccgcttcagcctctagagtagccgagaccacaggtgagtgctaccacccccgtctaatttatatatatttatatatataaatatatatattaaaatatatattttatatttatatataatataaataaatatataaatataaatatatatttttatatattatataaaatatataaatatatatttatttatatattatatataatatatatattatataatatatatattatataatatatatataatatataatatatatattatatataaaatatattatatataatatatataatatattatatattatatattatatataatatatataatatattatatataatatataatatataatatattatatataatatataaaatatataaaatatagtatataatatataaaatatattatatataatatataatatataagatatataatatattatatataatatattatatataatatattttatatagtat

SEQ ID NO: 461 - DNA, 8050 bp, Homo sapiens
tttcgaggaggtgtgtaagaacctcaaggactccagctaagaaaaacatgtggtgttagggcctccgatgcagtgccctgcgttccccgcgggtccaggtgacacgcatcctctccggtcggaaagaggagctttcaagtcctgattcaattggggggtggggagggtggagaagagggattcgccaggcctgtcgtgatctgtggtctgagtgacttttttcttttaatgcgcagaaaccacaaggatgtttgagcacgtttttagatcccctcccccatcggcaactccaccgcgcgaactcccagaggcccgagagcctcccgcgttgaggaaaacgctatgtccgtctcagattagcctcctttgccaaggaaactcgccaagaatccctgcgcaacctgcgctctcgctgtagagcatactaggtggtctttctttctttctttttagaatcttcttgcttttccctgtaaggcagaccttaaggccttaaggattggaactacaataactgatgtttaacagcaagtcagtgcctaagagtttggtctgtggccttaaacgtgccttacttattcgaaccagaagagcaaaacaaacttccaatttaaggcttctttcccttacccccaggctttttgcaggaccttccagttcacctggctggaggaggaccgtgagcctggacagtggcacaaaccccgtgcccgcgctcatgcaggcgcaccctcatacgcacacacttgaacgcttagcaagtcttttccaaggctgttccctctttccggggaaataaagcctagattggaaccttctgcccagcttcctcatttggccgtctggtctgcattagtgtttttataagggactcaaacaaatcgaatacaaggtcaccaaataattaacagttgtgaattccctccgtccccattaaaatacttccctgcttatatttcattttcggtttgccaacgacaacagggtaccggcaaaagcactgctgagttgattacaccactctgcggctcaggtccacccagaaacccgctgttttgcataacatgaggtaccagatgaacttcaatcgcgaggggactatgcaactctctgaatgccctccccgcagccgggctattcccagaatggtcctgctctgccctttggtaatcacgacccagaaggtgaatggagaagccaacaaacaatcagtggcaaactgtcctgagagttatttctagggcatcaagttcttcaaggatgttcccatctcgttttggtttttatctgttccttactgcctcctttttgagaatattattacaacaagaaaaaagtaaagggtattcttatttcaaagccatctggaaacctaactcacagcaatagtcttagactcatttcggttctctcattcttgagagttgttttttctccttgttggaattatgtggcacctttccctacataaactgaaagtctgaatcagtcagtctctttctctctctctctttccctctctctctctctctctctctctctctttccctctctctctctctctctgtctctctcttttcctccctcccctctatctctcagccctgctaaattcatagaactaattgtctggctttcccaggccccagggctgggggtccagggccccagtactagtagccttttaatgagttatttcatgagcaaattgtaatttcatcatatccaaccttgtccattctcatcccatgatggcacctaaacacacaggcacacaccttctcacctttatggatccaacatcatttttaaagcacaatataagagcatttttaaaaatcagggataatatggtttgtgcatctgctaaaataagaacaggaggaagcaaagcacaccaaaattcagaccctcacatctagtttcactcacactcctaactgggtcttaagtgactgcagacaaatattagactgggggaaaatctttccattttttgacttctgcttcttgtcatcatccattagaaaccacctcaccacttaaactatctatacagtgctctagttaaacatgcagggtctcgaatcttatataggccccacctctcgctagctgtgtgacctcgagcaacttgcttaactcctctgtcttctttacttcacctgtaaaacgtggtgatgatagcgttttcctaggaagtggttgtgataactaagcgagataattcatgtaaccaattttagtgcaatgcttggtacacagtaaattttcaataaatcgtggttactattattactcctaggtgtctggagagcatactgaaagaagggacctgttttaggtttgtttggtttcttttttttttccccaataagttctcctcctggaggatagggagaagtggcctgggatggagtacagaacttgctttctttataaacctaaagcgtccttcattcactttgggcagagtttatgcctgttctcccactctcaaccataggcttcaggtgtaactttggggtttccggggtaaggaaggctttttacagatactgtacaggagcaagtcgcccatgcctcctggactgacttcggggctcctttccttttcttcgctcctccccttgggggacccccggctccaccgagccaggccagccccactcgacggcgatttaaacatcccttaggcaaggcgccaagttagcgctgctggcccagctctaggcgggccgctgctctttcctcctcgccaggccgtccacgcgttgggggaggggaccctaggggggttggcgcggttaagagccccacgtgagaggggcggaagtccttgccaggagccggggatgcgcggctggcgggtcccttccatcacgggagacgagacaccgtttgatgtgttatgacatgaaccctcaattagatcgctgagttgaaacactccaatcaggggcccgatgctaagcaagccccggaaggtccagcctgaggtcaccgccggtgacacatcaaatcaaaatcagtgagagggaaagtgaggctttccctttatcaagctggggctgcagccagcaacgcaccccctcctctgcgcacccctcccgcccgtggctccgcactccttcacccccgcgcggcgtgcgacaagccgcaccgccttcccagtcaacgaactgcctttcttcgcattttctgagaacccggagacgcggaggagacagcgcctttgaagatgctgtccgggtggtcatgcagcgtctcctcccgctgtggaccgctcgcatccccagccctccaccgcattccggggttgtagcggtacttgtggatctcggtcctgctagtctggaggccttggctcgggaacagaggcctccccagactgggtgcacatgcaatccctcctctatctccaggatcgggggcatacagcgcagtggcggggatgggggtggggaggctacagggcaaaccagggtaaagtgatttcgcgtctacgccggattggggcccccaagacttttccccaacccttgtctgaatgccacaggcttccggagacacctccgaacagcccgcagggtcttttggtcctgtgccaaattcacagggcgcagcgaaccagttatggtgcccacttgggggaggggcagagattcttgccacttcattcccgggcaaagaaaatccgcgcccaaccgccggccagcctaggcctctgggacttcttctcttgaggaagggcctcttgagcagtcttctctgagcttccttagcctccttccgcaattgtagtagagaaagtgcacgattaacagaggactttgagggacagaaacaactgtagcaaggcgtgcgtcgtggggagggttggcgagctgcacgggcagcacggaggccagggactcagttgcactactacgaagaagccacatgtctttgcaaaggtgactttagtagccctaaaatcatcataaaatacctggcgttaatttgccctctggacctttcagcagctcatgaacctcgctgacctcgggctgcagcggcgagaccctcgagcaaggaacgcgactatgagtgagaggcggggactggagccggggaagagctcggggctgggggcgggggggccgttagcctgctctaaaaagcttaagagatgtgcgagcacccagggtagcagtggctgaagcagcttccgaatcccgaaccccagcgctgcaaggtttccgggcaaccccacttaactgggagcaggtcaaagtcatggagctaagtctagggaggatggaggagtggatatctgcctaaatcgcttttatcccgtcattttcttccttccttctctttactcttcctttcctttttctcccttcctttcctgtctccttccacattattgtctctctcctttaggagcttagtttccgatgcctgtggatccttccctgatttctgggaccagaggtggtgcgaggttttcttgagggcactggccacgctgcagatcaacgccggtggcaagaaggggccgcaagggtttccgcagacacccacacatgcaggcgttcccacagagggtaccagggatttcccagacccccaccagccctcaggaatagcgtagagagaggaacgtcgcctggctgagaaaggtggatgggcatacccatgtacctttgtgtattaagtacccacaacctccgaacttagccgtccctgtcccggcccgcccaactgctgccgccgcatctgcagaaaccactcgtgttgaggcctcggagcagccgggagcaccacgctggagcaaaaaagccggagggcgcagggctccagcccggctgaccatcccacccagcgcagggaccaacggaaaacccgcgcggcgccaggaccagggggctgcccgacgccgctcgcggactagttcctcagactgtgggactccctagtgccggctttgcccagggctttccaaggctgtctcatgccctagatctgccccagcagctcaggccttggactgcgaacccagtatcccgagacaccgattccatcagtccccatcccgacccctctccagccgggttcatccgcctgctgcctcccgtcctccacgtttcccccaccagccaccaacaagcggcaaccacgctgccttctgcaaaagaggaagaaggaaagaagggagagagaaagaaagggggggaaaggaagggaggtttagagactggaatagaatccgcagccacattcagaaacttactcgagcttgagaaaaacaatttaagaaaagtaaaaaggaagtgtccagagcaggaagggaattcacaaatgtagcctccagcgggaacagctccctggctgccgagctccagcgggaggggagtcgagcgttttctttgccacttacctagtcccctgtctacaaagctggtgatcgtattagccgacttggaagactggaaaaagctggcattgatgcccagcttctcagcgatggagtaagtcctgtagattgacagcatgtactcgtggggcaccacgcgcggacccctgcctggcggctcctgcgcccggggctgctgagcccggggttcgtcctgaggccgcggctgtggttcctggccctcccggcccgcgtcactgtcgcgcggcgcccgctgcatcttgccttccttgcggcttcgcatgcccttggtggaacccagctcggcggacgacgaggaggatgagatggaagcctgctggaaaccgggcaaatcccacagaaaactgatgaggaagacggccgagagcaggaccctgggagtatccatggcgggcaagtggctgcgtctccccaggaggcggtggcggcggcgcaggacgcgcggggcacggagcggctggacagcggccggggcccggctcctcgggcggactcggagtgcgaggagccgggtcccagccacacaaaccccggccccgccacgccccctcccgcccctcgccgggaggggaggaatggggagggagggcagaggaggggtggggagggtgggaggagagccgggtggtgcgggccggaggtgtgggggagaggggccgcggtgcgccggtgtggcaggaagacgcagcgcccccgcgggacgcgcgcggggttgccgggcggtgcgcgcggcgcgggccgcaagcgctgaccgggggaaggcgggcgctgccggcccgtggccggggagcaaaggctggcccgccgcgccagggtccccctcgaactcccggaggtgtggtccctccgcagcgcggccccggctctcggtcctcgccagccgcctccactttcctgggagcgagcggccccggaggagggaagcggcggcggcgcccccaagagacagcttggagcaggcgcctctgctgcaggctgcgtgctgcctcggggcggtggtaccctccctcctcggccccaaccgccaggcctgccgtttgcgcccctcaggggccagcccggagccagagaagcctcgccctgggccaggcgcagggcccagctcggaacagccccattttctcggttgggtatcgctctccacaaagacaggcgtctattcccgaccctcgaggtcaggcaaaggccacgagtctttagagtttggatcgatgctaaaagctgctgcgctcccctgcaggccccagcctctcctctcgcagtccccaacctcttctgacgcagactttagctgctccacttcttcgtctgctcccgggatcctctccctctcgcggcctgccccccgcctccactgcatccccattttccctctcttctttccctcccgcctgcaggacttcctccttccccaagttccttctgcattccaatccctcttccccagcctgcttttcttctcacactgccctcccatctcacactgccttcccaccctctctcttcccggcctcccccctcgccttccagtggacccctccctttgcagctctaccccaatctgtttctcttcagcccagcctcgccccatcacgagtttcctttatctgtccccagattccccgtgcctgtcttccccgcccactgcctcgctcattcctgggcctgcacgctgaaaggcgatgcggcgtagcgctgcttctgtctgccacagtgctctgccctggactgctatgggcagaagagtttccctcagtactgattgggtgctcaggcaccaaccataaagtaccctcctttaatcgtgccaacagctttgtgaggttggcgttgactattttcaccttcacggatggaaaaaaaaaagactcaatggaaataagtgacttttccaaggccactctgccaagaggttatgcagcaagggacagaacccaggctcccaccccaagcccaagattcttcccactacagcatagacagtcattcctggcccaacttctctatttcagttctggcttttttcttctctttatggtttcacttgatctcaggtggcttctttctccgccatgctactttctgtgtgtgttcccagtctctccaatctcctccctctcactttctaaccccttcttccttttgctttttcatcacctcttctgtcctgcagggaccactcacatgacagcctgcagggggagggagttttgctgcgctgctcccctcatcctttaacttccttaaggtctgggatatgccctccaccctggacactggcctcctccaggtaatggcaagcacccacagagaacttgtgtgtcagtcatggtttgaagcccttcgccaatattattttacttaatcttcacagcaatcctgaaataagtgctgtattattcctattttacagatagggaaagtgaggcccagggtcacactactccagagtctgggctcttaatcactgggctattgagcttggctgctctccccttggtctccgtggatgccccttctggccctatcccaattctacttatgtcccctagtttgggtttcatggttgtcaagttctgagaccttatacttgaaggtgcttttact

SEQ ID NO: 462 - DNA, 8050 bp, Homo sapiens
aaaaaatgagctttcatctgatcaccatacagcaaacccaccagtgagcaagcacatttttctcacccacatatagagtttctggtgaggtttctattacctcattcctacttatgaaaggagaggaaaaggtttgcagacagttgatgaaagcctctaacgtgatgggacgaaaacaaatacatgagaagggaagctagagaaagccaagacaaggcaggaggcaaagaaagccctacagtaagtaaatactctcaaaagatagaaaaaactagtgcgactgtgacataatcactaaattctctttataacagacagcatgaaatgagctctttaaatagttgaggtaacaactgcagtagaaagtaaagcaagaaaatatcttccaaaataggacaaaaggtgaagacatgtgcaacaggaaaaaaaaaaaaaaaaagaacattctgagattaatccagtttaaaaaataaataataagattgaataataattgagaatttaataagtgcctggtaatgttctaagtggttcagacatattagtgagataattactattataatctccattttatagatgaggaaactgaagcacagcaaaattaagtgacattctcaatagtaacactggaagctagaagataaaagagcaatttttgcctgtaatcccagctacctgggaagttgagtcaggaggatcacttgagtccaggattttgaggctgcagagagctatgaccatgtcactgcactccaggtggtgtgacagagtaagaacttgtttttaaaaatttaattaattaatttttttagagacaaggttttgctctgtagcccaggctggagtgcagtgtcatgatcttgactcactgcagccttgacctccctggggtcaggcaatctcctctcctcagccccctgagtagccgggactacaggtgcacaccagtatgcctggttaatttttgtattttttgtagagatggggtctagctacattgcccatgctgatcttgaactcctggactcaagtgatcctcctgccttggcctcccaaagtgctgggattacaggtgcaagccactgtgcatggcctaaaaattttttttaattaaaaaattaaaataaataagtgaaaagcaatttctataaaattatgaatgaagaaattctggtaagaattctacacttggtcaaactctagtaaaagtaaaagttgaataaagacatattcaagtatgtaataactcaaatttttaccttctgtaccctttcttgggctgttactaaaacatgtgccatggaaaatgaagcagtaaaccaagaaagaaggcacaaaacacagaaatgggggttctcacactacagattaaggagtgtcccaggccgggcacggtggctcacacctgtaatcccagcactttgggaggctgaggcaggtggatcacctgaggttgggagttctagaccagcctgaccaacatggagaaaccccgtctctactaaaaatacaaaattagctggacttggtggtgcatgcctgtaatcccagctacttgggaggctgaggcaggagaatcacttgaacccgggaggcagaggttgtagtgagctgagatcacaccgttgcacactagcctgggcaacagagagagactctgtcaaaaaaaaaaaaaaaaaaaaaaaaagagtgtcccaggatgacacttgagaagcggatccatagagcaactcatctccactgaaacagtagaacaatgaatttctggaggaattgttttcagggcaaaattggaattgattgtttgatcatttggaaaataaacatgatagtcatttgatagatcagttgtagaaaaatatcaggatggggcataacaaactaagtaaatagatacaaggttttataaggaagaaaacaagaatagtacactattggctgtgttgtcattgctattggcatagtcacttacttagctcctaaactgtgaaagtgctgtgttggaaggagaagttgcttggcatgaaagagctaaatcctaatctgaagcaacaggtagtcagagcacaacatctattggcaaatcaagagatggcagtacaaattatttagaaatagggaggtaaatgacagaagagacagataaaagcagaatatggctgcctctaaaaaggagaggaacatgataggtattgcattatcttaaaatattatattaaaatagtacctgcattgtcttaaaatatattatttctttaaagtgtgtgtttatattgttttttaaaaatacaattttgaaatttattgttgaaaatggacacatggaacaaaccaaaccttgttttatcatgtaattttcagaaaatatgtgatccataaagattaaaagaaagttgtattaagtctggcagctttagtattaacttgaaataaaatatggcaagctttccacgtcctcctttatttccacaatccatatgtacgagctagattccagtcagaacttccacaaatacttcactctttggtagcagcggttataaattacgcctttgctaatttgcgttgttcccaaccaggagaaacattaccacaaaaaaagtcagtttcatcctgcagtgttcccgcagcaaccatattaagctggaagaataaagctcctttgtagtagtagcgtctattgaattacaatgtaaatgttgatgcctgcctggaaacgtcaaatgacaacaggtttacagaacgaattcagtggttgtttgcagctctggaatcccaggctgcagagttgagatcgaagaggtgcgtctggccatcttagcgttcattcaaccaaatctcctcactccatcaaaaccacgccactccccacctgcccagctcgtaaaaggatgctcacctgtttgaaaatctgtaatatatctgatgtcttttacacagcaggacacgaaaaagtgtttgttgtggataagagtgttaaaaattcaattacgcaacagaccaaactttgtgcttctttccccctctcagcacaaagtaactttagtcccgtcctcttctgccactgtcaaacagccctgttactgtgggcattaaatgccttgtggcgtactgcgcatttgattctggttgacttgggatacctgagctcggctctcattagctcttccgctcgacccacaatccctagtgtttgcaggtgttgcattcccccaacccctttcttctcttcaaccagtagcctccaccttcccatccctgctttggagaaggaggaaaacgcagcttgagatctactcgaagaactgaccctcagctctcacaggctgccgccgagctgcaagcatgccgccgctccactcgggtaaacttcggagtgagttacctgcactcggagaagggccttacctgagcgcgcctctgccaatggcagctcacctgagggagctccccagccaatcatcgcgcagctcgtccctcgggcttgtaccctttagtgaaagaattcagctccttgcgagaaagttacctgtggccgcccaagtccgccactttctgctctgtgtctgcccattgccacgatccaggaggactccgcgccgcccggccgcctccgagctcgggccccatgtgaggggcccccccttatcccacctttccggctaggtgagggcgcgagcgggcgagcgagcgagagtggtgaggggggacggaaaagcagaattacctgtagctcttgttctgccatctcgggcgctctcacacaccttcacctgcacagacttgaaagtccagtttcaccagaggctgaggctccaggaaaagcggagcaagttcattggatcaaacatgtcacaagagtcggacaagtaagtggatcacacgcgccggctgctgctactactaccactttgggctgatggcaactggtttgttatgtttttgtttttaagttgctattgttggtatttttctttcttttttctttttctttttggtggatccagacttttccgcattatgtttctaccctgattaaggggagaaaccctacaacaatgtgaatatttaatatcccctttgggccttgatagtaaaagtgggttttccttttccttcttcccttaggaatggtctcagctcccgctcctggatgaatacttggatattgccagaggttttggtagatgggcgcgggaggcctgctcttccctctctgttttagctgctcccaccgatctggcgtttagggccatttggaagttcagctgagttccttcgatttgtccaaagggcctactggaaaagtggggcttggccgcttttgtgtgaccgcaacaaagagcttttatatgaggcagaaacggccatcttctcgcaccgggcaggagggtgggcgtgagtgcgcgcccgcgtgtggccccgatgggaggcgaggcgctgggaggccggggggcgcgggggcggccggcgccgtcccccactccctcgacatcccgccttcctcccccctcccccgcctccctcccccgggtccgcccccgcattgtttggccaccttcctcaggtgcccggggggaaaggacggttcgcgaactgggggaactcatgtgaggcctcgagttagggcctcggcggggcgcgaaggggcgcctgccactgagcgattcacccgcgcccccgacggcgtctgcacgcccctcgagctcgcggccctccacgcagttggccgccacctcggacgcggcaggcgggactgcgtggggcgcgccgagccttctcggggtgctctcgccgtcaaggccgagggctcggggcggcgggaacgctgggctcgcgtccttcccgtcccggacaggcactccagacgcgtcggggagccacagcctgcgcggccggagccgcccgcgggtcactgggcccggtccggccgcgtcctgacggcctcccccctggccggcccccgccctcggaaggctttgtgcgagccgggggaggtggggcctgggcgggcgcgggagggagccggaggtgggtcccgcggcctttctcgggattcggcggggacactcccttccccctcctctcgggcgcgtccgggcctgggaactggctgcgtcctattggaagtgcgcggggccgcccttttgctttccccggtaactttgccgtggcgttgcggccaccccgaggggaccttcctgaaggtgtctcgccggagagggccggtgccccaaggccgcgggccgctgggcctgtcatggagaagtggcggggacccgtcccaagttgagggaccacgagggaggagtgggaaggccctgcggacctgttcaggggtggaggggaaggactagcctcaacataaagccgctggcaggttaggcgaacctaagaaaatgcgctgtcatacttaaaaagcaaaaaactgccagatagttgtaccccgttagccaccgatgaggaattaaccgagtacagcataccggaggggaagaactagcgttaccaacacgggagcgggtcagaggcagggtaggaagaggagagtgtgtggttgtctgagaacacccccagctcctccccatatctctctagtcttcaaggaaacacgactcgagtttgaaattttcagtagccaaatccggaggcgacagcaagtttttggggtttgttttgatctttgcctgcgtcaaagatgattgcaaatctaatttaattaatcgcgcaattaacatttagtttgcttagttttgtgatacaacagaactcgaattctgaatgaaaacgggtcggtctttattttcaccagttatacttagcagcaataagaacaatgtgtttaccatcagaaataagtactgagcgcccgcaatctggtttcaccacacgcatcacctggtttttacaggtgataagtatctgggattacatatgcttgcatttaatgaacgttgcttttatctagtcgtggtttccaagacgaaattttgtatcctgggaaaagtaatcgttacaatggtgcaaggagataattcaactggtttgtttctctctcattgggctgttgaaaatgctttaagtcaatacatgacttctggatcatttttgcgaattctagcctcgttttcttaatattctaagggagccccggcaggggtgggtctgaagcttatgcaactatgtgtgtgacatggggtggggactgtaagtaaacgggcccctgggtacagcgtggggcttccttcctgagcaagtgagaggcttcatcagcctcatggaaaatccaccttacgaggcctgcctgtagtttctggaaataacatgaacgaacacacactggatgttctttcataatcccattgagatttaggcaatctttgggattgcacaggaagatatttctggttaacaagtctggactgaagtagcatcgtcttttttatggtgtggacttttcagattgaaacgttctgcttttgatgttctgcagtgttgatgctatcgccaattaaaacaaagtatttttaggacattttgtctttgtacatattttaaaattctctactccatcttaaattttatgaagatttaagatctttgtcagcaagcatgtgtacaagtgaagcaatgctagattaagaaactcttattttactgccaaaatgtataaaatatatttagagaacgtgtaggtactatgtgatttgatactcacaggtgtttttcattaggtaagtgtattttctggttacctactatttgtaacacattcagataggcgtaatagaggcatgcgaagatggataagatgagccctgttctcagggggcttacactgtagtggaaagcaactcatggacagacatacttctaataaacacaatgcttaatagtcacaaaaaatacaacagttacaaaaatgtttttaaaaatacaatacaggggccaggcgcggcggctcacacctgtaatcccagcactttggcaggccgaggcaggtggatcacgaggtcaggagttcatgaccagcctgatcaacatagtgaaaccctgtctctactaaatatacaaaaaattagccaggtgtggtggcaggtgcctgtaatctcagctacttgggaggctgaggcaggagaatcccttgaacctgggaggcgggggttgcagtgagctgagatcacaccactgcactccagcctgggtgacagtgcgagactccatctcaaaaaaaaaaaaaaaaaatacaggtcatgataaactgcctctccctactcatcgcatttttgcttatgataatttcagtcattttgtgtgttttttgttaaggagtcctgctattattcagaaaatggctgaagttataggtctctcatgtggataacatttcaagtaatgggatgactctacattttaattaaactctctagtctttagttttataaatgcatatgcttgtttacatttggctatgcaaaatttcttttaaggttagaaacgtcaagaatttatcatatctttttcaaaccaatacatatacccattcactttttgaaagaatatgccttgaatgccactatatacttggcattgagattcactggtgaatagaacttagtccctgcctgcatggtgcttactgtgtgtgtgttgggggtgggggaaaaggggcaggcttgttgacactaaatcaacaaaaaagtaaacatatatttaattagatgatgataagtgctatgaaggaaagcaaaaccagctggagggattgagaataatggggaggtcttttgtatagggtgatcatggacagcttctccaatgaggtgagctttgagtggaggcctgagtgaagtgagggatcaagccctaagatacctggggtaagaatgttacaggcaggtggaagagcaagtgccagggccctgaggtgagagtgtggttagcatggtctaggaccagaaaggagctctgtgtgggtgaatcagagtcagagataacggcaccatcaaataaattaacatgatcagttctctacttaataatctgg

SEQ ID NO: 463 - DNA, 8050 bp, Homo sapiens
cctttgctgcttttacactgggtattttccaatgtagcgttttaatttaatgattttttcactctattttctaaattatttctttagtggttgttctagggaccaccatttacattttatcagaatctactgtggatctgcgctaattctaccttcttaatctccatttgaggcaatattggctcaccccttcctttagttttaccacctttagttctttaatcatgtcctttagttcttagaccatatttatgatggccactttgaaacctttttcttttaaatccagcatcttactctacataggtagtttctattacctgcctttttccccagtgtataggccatactttcctgtttctttgcatgcctcataattatctgttgaagagtggacatcttaggtaacctattgtagcaattctggatactagccaacccaatctcagactattttcctactttctttgcttagtgaccagctagactattttagtggcatctatttcccacgccacatcccagagcctctgactgcatctcagtttttctcctcaggagcacagcctaggttatgccctcagtcaccctggatgacagtggtttgaaagtgttgcaaagctctttgttgttttccctgaccacatccagctgttaagctccactaatgatcagctgattgttctactgttttaaatgctgccctagacataaactgcttcacaggttaatccaatcgaatttgggctcctttgaagggatagttcctgaagttagtgtttgtgatacttttaccagccagactatatttttggcatatatctccaataaatctactgatttaccacagttgcctttctccatcacttccactgtttttgagagcacccttaggcttgaacttcacatccttacaaatgaagtcagttcctgtggggaggaatgtggagctctctgttctatggcctgcttctccagtggctctgccgtttggggtggggacaatgctgtatctcccccaactttgggagctgagcgtttggtgggaggggaatcagcaataccaggtgttctgggcttgcctctcagtgtagactccccactctacaggtgaagcccactaagagttgttgcctgcctccatccctcacacccacagctcacctcataaatctatcttgtgcccagcactgccatgaggcagaagttctccaacattatgtctctgtggaagcctctggggagggcttaggaattgccaactcctctagtgaagtcactgccacatccgcgcagcacacagaacttcacggacctgaagcaggctggaaactctgctctctccttacagagactggaggagctcagacataattgctggagagggcatgaagacacaaggcctgggatgacttgcactgctagatgagtcctatactcactcacccatcctctacaatcatgctacccagaccccttgtaactagttgtactcatatgactgggacctggctcgagggacaggagcagaagtggtgtgctttctggaggcagacacagtggtggggaggcagacacagtggtggggattagagcaggtgtcctgtaacatcttcaaccctgtggctcccttcatgaactacacatggcatgtcttggtctgtttgcatggttataaagtaacacctgaggctgagtaatttataaagaaaagaggtttatttggctcacagttctgcaggctgtacaagcagcatggtgccagcatttgcttctggtgggggcttcagggagcttccactcatgacggaaggcaaagggcagcagcatcacatagcaagagaaggaggaagaagggagggaggtgccaccaggctctttttaacaaacagttctcacagaaactaatcaagtgagaactcacttgttaccacaaagatggcaccaggctattcatgaaggatccatcccgataacaggaacatctcccaccaggccccaccttcaacactggggatcaaatttccatataagattagaaagggacaaacatccaaactgtatcatggcagaaggagcctggctctgccagacagttgagctgtttcattagccctgatttcccttctcaactagtatgtgtgcaagcactgaactgctatcttgtgtacacaactccagggtccctctgttattggcgctgggtagggtatggtgggaatcctccaggccctggccatgaggtgctccgtatttatcgcctctgtccgggtcatggtgggcaggtgggtctgcctccccttctggaccaggtgaaccttaacaataggtgcatgttttactcattccaagtcccccaggggcctggcccatgactggcactgaggagttaggggcaatggcagaactgcctggacctgaagcaggctggaacctctgttctctccttactgcctgtctcagtcagtttggattgcgataacaaaataccacaggctaggtgtcttaaacaacataaattaatttttcacagatctggggactgaaagtccaaaatcaaaggcactggcagtctggtgtcggctgaaggctttctcatttgcagatggcaattttctattttatttcctttttttttttttagcaataaggtcttatcatgcctaggctggtctcgaactcctggactcatgcaatcctaatgccttggccttccagtgctgggattacaggcgtgagccactgcacccagcttgaagatggcagttttcttgtatgctcacacagcacaaagtgacctcgctctagttccttccttttcttataaggactcgatctcatcggcgagccccaccctcacgatctcacctaagcctagtcacctcccaaaggccccacctcctaataccaccctcctgggggtcagggtttcaacatataaactttggggggggacacaaacatgcagtccttaacaccatcgtcatggaaatggaggccacagacctaccaacacccataacctcaagggcactggtggggacagaggggtcttacccagcactgccatgtggcagaagttctccaacattatgtctctgtagaggcctccaggcagcacttaggaattgccaactcctctggtgaggtcactaccacatcctcaaggcccacagtctcctgaaacaacagaactttgctgcttcatggaggagcgtcagtatgtccacaccataggggtgtagtcacttccctctgccagggagaatggtggaggaagaatggattcctagtgtattttttctcttcagaactgacagcccatcaaggtacaatgaaatagaaaaaaggctggccaggtgccaagtcccagctcaagcctggcagctcctcccactgagcctcatggtcaccccagaagacaggccttcctttcacacacatcagaaatagggaacccaagacctcgagagaggaaatgggcccagggacatgccttggcttggggtggcttaggaccagggcaagacgcctgaccccagagcagaccatgctgacactgggcaacacattccctgctctggacctcagttcctttggctactaaggaggcccaacgatcctcgcctgtgtgggacggggctacctgcagacatagagggcctttgagcacctcgtagcttgcttcccagccagcctgggtgtggaaatggccgtgctgacaggctctctgcgatagggcccagccatggccagtgggcctcccacaatctgcccctgggtgcagggccttgagcagggaggccatcgtgctgcctaagagaccaggacccagcaggggccatacccagattcagaggctcaggaccaccacggaactgaaaggaggttcaaggcctcaaacaagagtggcccctaaaacagttggtaaaggagtgttttcacctctgtttacagttgagtgcactgctcaaggtcatgcagctggtgaacggcagggagtgagcagtggagaacgtgaggctggtcattaggagcaggtagccctgggtctccctctgccctcagcaacttcacacctgcccctccctgggccccagtctcatccctaaacaggagtgaccccacctcatttcatgtcatcatcactgccctgcaagggaaacaacagatgtgcaaggtctgagggtccatgtgtggaagcggaggccagagctgacaccacatgggcaaaggagtgggcgtgtggggctgggagctggggctcatgtgggaggctggtggctgccatggctgcagctcctggccctgcggacagccaggcctggggtctacaagagctgggcagggaagaggacaaacaaggtctcacaggtccattctccccagcctcccagtaggcagctgagtccaacgcagtgcccgagagctcagcccttgtcaaggagagtcctcgaacccagagggggctgggtaagcagcagaagtgcagaagccctgcccaggccctgcctcccaggccaccacccacccctcacggctgccacacccaccagcccatgactgtccacatcctgacccctacctacctcatgacctccccgaccctgatctccacacctgaccccaaagcacattttgttattttttgtttttagagattaggtctctcactctgtcacccaggctggagtgcagaggccataactcactgcagcctcaaactcctgggcttggggatcctcccgcctcggcctcctgagtagctggggttacaggcacatgccaccacacctggctcattttcttttactttctgtagagatggggtctccctatgttgcccaggctggtttcaaactcctgaactaaagtgatcctcctgccgtggccttccagagtactgggatttcaggcagaagccaccacacccggccccccaataagcacatttatgtggggcgtgaggtgaggtccctgaggtgcagtgtggacgggtcttgatttgtcccaagttgtcactgccctgtgccacagcctcccaagaatggatgcagtctacaccttctgcaaacccctgcctcaaaccgtgtccctccacaagcacatccagccactgggaccctgaacctcctccaaatggactttaactggggacaactgatgacagtcctccaaccccagcgagctggggaagccgtgggcaggggctgcgacttcctttcttccaatcaaccccaccactagcaatcaatcacttggcccactggataagaacagtggcctgcgacgtcaggggcggtccaggtgctctccatcgcatgctcagccatggctgagcacgaatgaagcatatggaagtcacgcacagacaggcccagggcaaggtctgctctagaccctcctatgcaggagacagacaacttccaggacagcgtgcctggggtgctcgcagaaggccaggctggcacaggcaggacaggtgttctgtaaaccaaccccaacgcagaaggggctgaaagaccacctacccatcctaacccctgaattcaccatgccaccctgaaagtatggcctctcctgggcatcccgagggatgggagctcccagagtggaggctgcctgtcccgagtgaggacacaggagcgccctcaggcctgagcactcaggggtgccaccccaaagatgaaggcagtggtggaaagaggttctattagcaggctggaagcagccacagaggtcccaaaccatatgacgcagcacctgctaccccacgagccactggaaaactgaggctgcaacttgcaggggcactgtgagaagacagggagtggctccagcctggtgctcacagataaaacgcggaggcatttaaacaggaccagagactttctcgctctgctctggcaagctccagggcttcccaggggcctcagcagccccagaaacagagtgaagagacacagcctcacagagctgtgctgtggtgtctggtacagcggggctccacctgagagggcttggggaaaaagattctgaggctaaaacattcaaccacttgagcttctgagacgggtcaggaagtgaaaacaaagtgctcggaggacacggcagtctccataaagcgttctgggggacaggaccgaggcaagaggtatgcaccaggcagctgggcccagcagctcagagatgagtacgctctgggctccctaaaaacctcactccagcagcgagcccaggtgaggaggggctgcaggaggagcagggcccgagtcccctgggtggcacaagggattccagccacaagggctgcacctagagtcaggctccaggccttgctgcagttggtctggaagaggggcaccctgaggacacagccactcactggggacaagcgcctacccatcagcccagcacagtcagcacaagagcaggtcaagaacgggaagagctcaggtcctgaagagctacagtctcacagggacaagccatgtccagaggactcaggagagccagccaggagctcggccagctggcctgcccatgccctccccagctccacccacccaggatgtcctactgtttcagagccctcgggacatgttctaacctcctgtgttgcctcaagcagctgcaatccagcagtcttggttaagaggctctattaggagtgacacgtgagcccagaaatggcacaaagtacatggatgtgcagaagttccccagacaatgaagcaaacagtgcgggtgacaccacaaagacaatgggacacaaatgggaactgggactgtcgttcagcaccgagatctttaaaaactatttggcttttataatcttcacacatgcattcaaagcaagaaacacacacttccaggacatagatagggctctgtcagcaatgacttttgcccctgtatctacagagatgtgaaagtacgagaaaccacagcgagccaaatcctctccttcatgagaacagaggtttcagtggaatcaacagcagacgctggaatgcaaactacgtgctgactcggccaaatgatatgaatttaagagaggaaaagaattcaagggcaaagcactgaaaataacatagcaagaaaaacctatttaggccgagtgctgtggctcacacctgtaatcccagcactttagaaggatgaggaaggaggatcgcttgaggccaagagttcaagaccagcctgggcaacacagtgagaccctgtctctacaaaaaaaataaaaaggtaggcgcggtggtgcgtgcctctagtcccagctactcaggaggctggggcgggaggatcactcaagccagggaggtcgaggctgcagtgagctgggatcacaccacttcactccagcctggtcaacagagtgagaccctgcctcaagaaaagaaaaggacaatgcacctattttatgctcgctgaaagacgaggctaatcactgtggacacagggcgttctggaatctcagctgcaggcagtgagtgttgcccgtgaaatggagatgccgcaaagcaactacagacatggagaaaataaccacatcctcttacaaccgcctctgtgaaaactgaccaggacagacaactcctccccaaaagtattactaacgtgctaacagctggggataagagcacacatactgctagaaatctaagcagcctgttttactgttttcagtgacttacgtggaaacctaagactaatctctgaatgtctgatcaagacgtattcatgtaaaggccgtaagtatgaaattctgggcaacatggtacattggactctgagccaaaatgccaaaataccacacagggtccgtgtcctctatccgggtgatgagcagggcctggtcagccactcctactttcttcccagaaaggaactctaccaagtcaactctccgtggggccccccaacatcttggggccagagcccatgggacaggatctgcgggtaacagaggatggttccagagtcattctgctgaatgaggccacaactgaagtgagatgtgcggcctgttcagccgctagcaggccaa

SEQ ID NO: 464 - DNA, 8050 bp, Homo sapiens
acaggggttcacaaacactgcttaatatctctttaatgattatgaatactagaatagcttagaggtataccctaaaggccaccatatagatcttctgtacagatgtgaatttaaaagtatgcaaatttacactgattttacctaacaccttggaacataccaggagtctgaatacataaatatatttttattatgatatgtatatttttaaagtggagtttagaaatttctagctacactgaaaaattataatgaagtaggtatttactgtaaaaaactaatgtgctttcttaagggcatagtttaattaggcactataataactgacaaacgtacactgtgtaaaagtttacagtgactcttcacacatactattttatctacctcttattacgggactaccatagggtctcaggtttacagatgagaacatgaaagcactgagagtttctcatacttcattctggtaccatgacagctaataagcaaaagaaatagaatctgctcacaggtcatgtgaatgctaaagaaagtaatctttcaactgcacgcttcaagtggttcctgtgctggtgaataggtatcccacttattgcttttaaattaaggtaggaataagtaatttatatgtacagtcatatgagaatttttcactggttttattttggtcaaaaaataaatttttgaaagatgttaacctcctttcaaccaataaatatttactgtgacttatacggctgatgcttgagtatagtagaggcccaaaggggttaagcgactttcaaaataatagttaactaaaagagatggaactgaaaccatatacatatttatagcactccatgggcaaccaagttcaactatatatgaattactagtcaatgacttttggtaggccatgcaacctatctgagcctcagtctccagatctacaaaatgaaaaaatgaaacattgaaaacataaggatattgtgataattaaattagataatggaagttgaagtgtcctattattgttaagctcctcctaattgtttttgaagaaaacaataactttaccatgtgatttaggaagaaagtttcaataagcttttaaaaattaaatgttaaatataatatattcaacttcaactattcagcatgtaaattgcatggagtaaaattcaaagtgtccgatgttggacatttaacaattagatgttcaactgggggagtcattgttctctagacagctgctgtttctttaaattgggtgagagagttatacaattgctgagtcagatgatctggcagcctgaaagagaatgagagcaagaaaatggtggcactcgagaaaagaaagcaaaacaagctttttcctaatacatcagcaaagtcactggtgtaatattagacaaattttagcttaaaagcagaaaaatgatcatttgaaaggcatgatattttagtttttcttataattgttactttttagcttacatttttcatctatatttccccccccatcactgtgcttttacagagacataaagacccatcattttgtccataaatgctttattctgttatggctacattttcctgcaatcttgccctgatcttagataagcataagttaaacctgtgaaacacttgtgctttgatttttcttttttacataattttaggttgtcatgtttattacgagcctggtctggatcataaaatgaaagaaaccccttattacaacacacacacacacacacacacacacacacacacacagagagagagagagagagagagagatccattcatcctgcacgaacagaaagaagtgtatatagtgttttaaaaagacaacgtatcttatatagcttatgtggaaattttctgtctggttctgtaagctttaaaacacaaatatatcttgttatatttttttctctcaaactatgttctgactgtaaaaatgtggtatctacaagacattcttttccaattcatacaaagggtcacataataataaagggtctccttcatttggtgaaataactcctccactgattactcagactctcctccctgggatccagtaaactgactctaaacttaaaatcttacctaaaatcctggacctcaattcaaagataaagaagcagaaataaggtttaaaaagtaaaattggtcatatttgtcaaattgtgtcccaatgggccacttgtattagtatctccttcaagtgtttatttaaaatgcagatttctgggacccacagcaaatctgaatcaaattttctgaacgtgaaccccagaaatatgtatttttaaaggcagcccaggtaataatgctgttgttaacctttgccatacttttaaaatttctagttactcacataattcaattaagaaagcagaggcttttttatttacgttaccttgattgtacgattttattagtttcaatttgcttaagagattacatgtctttgttcatgtaattctgaacctctataaaacttttctctcttaaaaaaatcctactgccttcacaaccatttaaataatttatgatattttattttgaaggtgaaagagaaaactgagaaatagttgaattaaaaaatcctttgtgataacatgtttatattttcatgaacaaagccaataagtcataaaaattaaaaatcaacatactattttttgaaaggacctctgatgctttgggaatttcaatcctgtagttgatggctttcacttttttttcccttttattacttctttttgattgtagagttctgcccaaatgaaaccatcattccagggctcatgaattaaatgaatgcactgagagacactgacaagcactgagaatttcttcaaccaccctttttaaaaaacaaatgctaattggacataaatatgagaacaatagacattggggactactagatggaggagaaagggaatgagcgagggctgaaatactacctactgtgggtactgtgctcactacttgagtgacagattcagtcgtactcgaaacctcagcatggtgcaatatacctttgtaattaacctgcacatgtgccctctcctcctaaataaaagttgaaaaaaaatctacgaggcactatatttttaaaaataccactatgtacaaggcactgtgctatatctggaactacaaatattagttaaatagtccaagattcagtgggttcagagactctaagtatttgccattccctttagatggaaacgttctttggtccaccaagccctatcgttctgctctttggaaattctccctcactttcttcataatgccgtccttgactaactctcctctagcaatactattggttttgtatgtgatttaaaatcattcctgtaatttcttctgtttatatggcttcgtacaagagattcacattcaacaaatagaaaaaaaacgctattgacatttggtagcttcgacaattgtaaacacatgtgggtttgctgaatacacattaaaatagcatgaattaggatatggtaaatctgttgcggtcccaagttggtgggtttttctaggaagagtcagaccctttaaaaggaccttttatcatctaccaaacaaatccttcatttattaattcccaaggttttctccatcggttggcttactgtcatggaaattgatcttgttttaatagctacttacttttttttattctaatcaatgatttcatttgaaaagaaaattttcaaacatggggaaagctgcaatataagaagaaaacaatggagagacatcgtcactggaaaaatactacgggccactctctataccatcctgcacccccagatggagaaactgagggaagtcgtggcctttcaacactcttgggtctccatctggcttggaagggaacgaaatggctgtcaagagtctcagaagcgcactttccccgtggttcctccgggtaaccctgactcacttttcatctacccatcccctccaaaacaaggcctagccagttccaagctggagaggtgacccagagttgccttctgtcatgtcctgcctttcgtctcgagtccactaaccccactcagactctgtctgctcccacccccaccgcggccagtgaaatcccaatcgtcttccacgtggaaccccaggtccgcagttatgataacggatcacatcgctcctgcggaaagtgcgcgcggtggagtgataattggacctagcgtctaaattcttgttggaggacctcgttccagctgccagttaagcctctgggatccgcagcgtctctaggaattgagagagtggggaagttaggatccaggaggaggatggtgggggctgaggagtggaggagcagcgtgcatctcatctcttgtcgccgggcgggcgctctttcgggtccagggcccttgcacccccagcgtggctccggaggcggcgagacctgcctgaaattgattggaggggactagagtgtgcttgtggggtggggtagtgggggcggagagaagagatcccaagaagggcgccaagtgctgtgaccagaggcctaacacgaggcaccttggaaacaggtatagctacggatttatgggttttaaaatggaacgtcttggtgaatggacatagcgtgcatttcacagtctgacgtcacagccctcgcaggttttcccagaccttaaagccacgttctcgtgtatgacacttaaacaactcagtttccttgtctttcctccctccctacccatctaagggtagagaagctcttagttcatccactgtgtaggactgttaccgtgtgtcaaaggctttggaaatgtatattttactgatgatggtcatagcactttggaaaactcaaaagtgaaacgaagaaaataaatatcaccaaactttttcccaacccctctcatcctgcggaaaccattataactaatttggtgagagagagagagagagagagagagagagagagagagagaaactgtttactgtttggaatcttgctttaaaaaaacctgactttataatgcaatcatttaacagtctatgaaatattcttcagatacctgatgatccagaatgtaactgtaccataatttaacactttattgctagaattttatgcagtttttgatttcttgctactacttatccatctgtattaatctttgtcagaacctttctttccttaggatgatgcctgaatataaaatagctgaatgaaagtggatgggttcattttaaaatacaaaattgtttttcttgatggtgaagtgtttaagaggtggattaatctcattgggcaacaaatagagaagatattagtagttaggtatatgagaatcagaattcagataatttgtcttaaaaattcatattcaatgtaaaaattttatatttagaaaatgaaactgtacccattgtttatataacttaaactgccaaaataaagcaccacaaaaactttttatcacgttggtttttgtatcaggctgggctttgcagcagatggaggagctagggcaagcttgtccaacctgtgggcccgagggtcacatgcagcccaggatggttttgaatgctgcccaacacaaattcatacactttcttaaagtatcatgagtttttttttttttttaagctcatcagctattgttagtgttagtgtatttaatgtgtgtcccaagacaattcttcttcttcctatgtggcccagggaaggtaaaagattgaacacccctggcctacagtgttctactatgaagtttcagttttagttcggcctagaatgttttagtacagaaggcaagtgagattttctctgtttctccaaggacttttgaaaaagtgtaaaagcactgggcccactgttgaaccttgctataaaaaagtatttttgataccatttgtatcactttagtaataggagtttttcatatgttgggaaaatggtttagcttaactctatcatggtagttgatagtgatgaactaacgtggaataatagatctgtaaaccatcatagacggtaataggctatgttgttgctaccttaggatcataatggactttctaaaattcaagagtactcaaagaagtaaaatgaatataagtcttgatttctgaaagggctatggttcacttggaacacaatacaaactgtgaatcatgtacacatggggaataatggtttatactaactgcacagtgcttaccttgagaggactctgtgctattaaagaaaaaaataacctgagccttctgaagtagctataaacaaatgaatatttaacttcataataaaaatatgactattttgtaaatgcaccaaggtagaagtaacaaatcaactatggcaatttttcaggtttctgtggttaagaaactggtaacgtggaattttagtatatgtatttccaatcatataaaaataaaaagtcataataaacatatttgcagaaacttaaaaaaagttaaaataacatcttatttgcaatgatattaaataattcatacaagtaatttttagcacttgtgcctctcaaggaattgtatgaatcctaacataattagtatccatatatattcccaaatcaatatagccatgggcataaaatatattaatgtgaaatatataattacatatcattataattaacaccgctagattttatattatgtatatcattttacatatgaaattggaaaattgcatatatttcaagacattctatccaagctgtgttctatcttgagaaacttcctgaagattgcgcttttcacatacgtcctgaaaattgatttatacctaaataacaaaaaatgatctatttcaatgaacctatcatttaaatatttttgcatttcatgcatatacattaacatactataaaatattttctctaacttaaaatcaccacaatgttatgttttataggcctaaactaaaaaatacataattatggcatttatatacattgacatgttctactttgttactacagattttcagaggcaacttaataatttaaacaaaatgattttatatagaataatattaactagagtaataaatatttttatatagacaataatattaagaactatattcatacagttaccggtcacagtggctaaacttttgctgatacggataaaccactgttaaaaaaaacaacaaccagggtcttgtcaatgtttcaaaatgaattaaaatcaaatccagcaacaggccctgaaatcctttataagctcctttgactaaattaaaaaaattaacttgcataatatgaaaagtaaaaaataaaatgtgcatttatcctatagattataaatttttgctaatagaaattgagacactaaattaaacactgatagttttaacaggtttatatttccatgtcaaagagacaattaacattgcagtaaaaaaataattacccctccgctggcctttgctttttgaagctatatattcctggcgaagcataccacaaggacggtcataaaagtgaagcctcattaaattacttttagacttattacacaagttttaattagcattgtacatattttaactgtacatatattctttcagttttcctggttataggaaattacactggctgtgtcaacatttgtcaatgtgaggacaaaactaccttggattctgtttttcaagaagtaggcctcatttttaaactgtgctaactgtcgtctgagatgactaaaatactatcagttgggatttctcaggaacagttctacagttctgtcgtttgctaaacatacgagcattgtcccgagcagtttcaatcactcaggccgccggacctctacctctaactcacaaagaaagcccatttccctgttggctgcaaaactcccccaagaagcaagtgcttgctcctcgcagcagtaactgatcctacgatccttgttagcatttcaggaagtcgctgcctgcgtgccccgtatctcacgggtcctccactctcctggaaggtgggagagggtgaccccgccgggaggctggggagaaaaaagg

SEQ ID NO: 465 - DNA, 8050 bp, Homo sapiens
tcaattgagcctctcccttacattttcaatctctttttccctcaatggattgttctcctcagcttataaagcaggctcaagtcttcctatactaaaaataccactttccctctactacaccattgttgtgatatatcatactctctctccttctcttttatctcccaacttattgaaaatgaagtctgttttcactgctttccatttcccttcccccacgcctcccttcaacccttgcccctggctgccacttccacctaccacaaagacaatcaaggaaatccaagagtcaaatccaatggctttgccttggttgcaccgtcacccatggggtgtgctgtgtgagtgacaggggctctcctcaccccttccagcttccatgacactgtaccacttcacttccatcatttttctccaattgccccttgtttaacgtggttcctgtcctcttctttctctttcccctccaacatacagacatccctcaaggatcctatccttacttttgcttcttctttcttcattttctttatcagtgattcctgggatatgaaaatcgctcctaagcagatgacctacaaatctcctggtagctctaacctccctctgtattctagtcccttaacttggacaagcctgtcatgctcaaaaagaaacttctctcctcttccttatcctctgttatatcttctttctgaaaatgacccaactgctctctcagctaagcctgacaatgatcttttggcctcccttttcccttcctcactttccagtgactgttcaagctcctcagataattcccgcacaccacctcttaggtgtgttcccttcttgcctcccactgcctctttccatctttcccctactttgacaatagagtctatctggtctccctcctgccagccttttcccatgtcattccatccaacataatactacaaaagtattgccccaaagcacagttctgatactgtcaatctttctcctcacaaatcttctatagttccccagtccttactgaacaaaatccacactccttagcttggcgtacaagttgctccaccaccttgaacaaacctctctttcttgctttatccctcattacatctcttggcattcctagcgcttcagccaaagcacaccatttttttgtttcctgtgtaggcatacaccttccactgccaggcctgtgctacactgttcctcccccaagcatgcccttccttctctgccaacccaaatgccaccttaatcacagctcaaatgctatatcccatgtaaccttccctaattcttccatcagaagtcactttgtaccctgtgaactcccacagctctgcaggaatactgctttttcagcacttaatcatttttcactatttttacagttagtaacatatttcctcttttctccttctagatcatgatccacctctggccaggatctaagacttagcattctttgaacctccaacccttctcaacattccctgtcccctatccaaaggtacagtggatctgagatgcgggaggcaattaacaaatgtttgcaaattaattattgtaacccagagagttaacttcagattttacggcttgaaattctctcaattttagcaacaattacttcttctttctaggataaaagtcctatctccccaaggtactacagttaattccttttggccccagaggtcaattttcaaatatctcttacccctaagtcttccgaaacaaacaaacacaataacaacaaaacaaaacaaaacaacaacaacaaaaaaccttaagaggctcaataatggaagagaaaagcactgatgctactttaagtgaaggaaaggcatccatgcacaaaaaatggcttgctgcaggccacagcaaaaggtaccaccatttattagagctgtctcattaaccttataccagtccgatctttagaaaagccagatattgcatttttaaaactatcagcctgggcagcatagcgagactctatctctgaaaaaaataaacaaatatctgggtgtggtgccatgtgcctattgtcccagctactcaggaggctgaggcaggaggattgcttgagctaggagtttgaggctgcagtgagctatgatcacactactgcactccagcctgggcgacagaggaagatcctgtctcaaaaagacaaataaaaataaaaatgatcacatttacattagaaaagaactgattcctgagtcatcgattttgctgctgtgtaattcctctttctctaaacagggtatttacctggtaattcctcatattattaaactttcttgtgagacatttacatccctggtcttacttgcaaatataaaggatgatgacttttttttaaaccaaaatctcttagaatggcttttaaattccctaagtacttttctcagaaagacatttggcataacaaataagagagtaaagaactaagattcaaaattcatttttataaatctatccttaaatcttggatgacagccaacaaccaacctcacattaaaatcttagaaggcttgacttgaagaacatggggaaatttactttacatagacagcttcaagagcaccttgtctatatatcattaaataagatacatgggaagaaaaaaaagcatatgtggatagccctagttttattattttcacaacgatatcatgcaatctttgcccataaaagaaagcaaaacaaaaattttaaaaaagaaaaataaatctctggtgccaacatgttgtatatttacttgtgtagccatgactgctacgggcttttcgaagagaaccgggcagccagtttggattccgacaatgcagtagaatttaaggtgttatgactaaaacatgtcctaagcagattaagctagtcatacaacattttaataaagaagtgtcgagatattaagtgtaaagtgcactcattcctatgaataccgcaggagaaacataggtgagggggaatcacactgccctggatacacatgaatatgccatctccctgcctacctctacccaaccctacctacacacacctatctttaccacgcagagacaattaaacagccatagactctggatgcatttctgtgtccttgttcccactgggtgagttgttgccagcctgacatttttccaaattccctactagtgggctctatcaggtaggaaagcagggactttactgacctgggaccccatcgctgtgggtctcaggagatttcagtttccaaatgatacacggcaccacctagctattgtgacagctgggagagtggatgtcaccagcagtagaaataaagtatcctgtttcctgaggaaaacgccctggctgtgtgatgctgaccaagtgggcaccaaacatttctccgtgtgatatttttcttctttttaaaagaccgccccccgccccaccgcatctctctatacgtatacacctccagagttcattctaaaagaaccaacacaaagaccatccatcctctagccataaggttttcagtgcttaaatgtggaaggagaaggtctagctagcattgaaagttgtggggacaggaagaggaatctgatcattcaacatccttctccttctggtcagacaagagaaaaacaatagaaactgcacagtcagggagtacaagacccttatggaacaggtgctaaggagagaagtagtatcacaggatggaaggccccttcaaaaccaggtacattagcaagcccagaatgtgtaacggttatcctatttccctgccatgtgcctcaaagcaacatgctcacttccacatccccatgtcatgaggccagaggaaggggaagcgagaatccctacactgggccatccacacgcaggagcagaacagacactgtgctcagagttgcagggtcaaaataacaaacactgtcccacagtcttagccggtgacatcaagtaagggcagcggcagatctctggatttggggcgcagtttggggaacgtggatgcaaccacacgcgtacacacacatatacaggattttacaaaccggcccctatcccactgcctccctccacacttcacacaccaagtgcatcctgcccacctcaccgtttccatcatcacattctttctccaggagagtcagccgagagatgagggggtcctagcggggattcctggaaatgtcaccccccaacacctccgtccgccaccccatcccctctgctgtaccttttacacacacactctcacacactcactcctgccatgactgtcatcaggcccgcctgctgcgcccgaagcccggcatctcagcgggcaccggaccccaggcgtctcgctcgcaacgccgccttcccccgcctcgctagctgatggttccaggcactgcctcctggatgtcgcctgctgcctccgctcctccgcactattgttccaggcagcccctctcgcgtccgggggcgccctttggcgaggacccgggctccgtcgggggccgcatcagcgccgggcaccccttctcacccacccctccctggctgtggtaccttgcctgacagctgggtccgcgggcccgcgggagcaggcggcgctagtgacagcgctggtgccaagcctgggaataaagctccgctccagccgctgctgcctccagcgccaccatcttctcccgccgcagctgccgccgccgccgccgccgccgggaccgcagccgccctcgcccagctccggctccgcagccgctgctcggacccctccggtctcgcggccccaccccctttccccaccctccctcccgccctccagctagctcgctggcccctcgtgacgcgcgctggggccgggcgggcctgcgagggagggcgcgggggagcgcgcgcgcgcacgccgcctgctagtagcgcccctgcctccctcgcccactcgcgtgcgcgcgcggcccgcgagcccgcggcggcggcggcggcaccgctgatgtcctccgtgggccgccggctgcagcgcccctgccccggcgccggtgggcgtgcggcacacccgcgcctctcgccttccctcgcgtccgggttccgaagggcccgccctgcctttcggaatgggttccacagccccatcctctggctcccggccggacgcaaggaggggaaaatgcagctgcatccccgaggggactgacgggggcctccaccctcctcggtggcaacccaggtggtccccagtttcctagccagcagctgtggccaacctctgcgcgaagcaacgggccacgctgcaggaccacgaagccaggcagccgcgtcgactcctgcagggtgttctctccggagtgactcccgagctttcccgcttcccaggccccttagatatcgcctgcgcttcaaattcggagattgacggcgtctccggaatgcgtcgcagtcctgcgagttctccgccagggggagagccgcgcgggcttgggcctgagcgaagacagccgggctgcagccctccaggggaactgccgagtcccgccggggacagcggagagcctgcggattgtgaagccgaggaaggctcggcttggttttcctacccgctcctcagttctggttgatcggaacttaagtgtctttgagcctagcacaggccatccgccctagatatggctcctaactcgagaggccaccctttgcggcagggaccaggtggcaagtgctgtgcattaatgaaaagctgtgggctagacaggccccgggaggcctgggctctggcgccagccccacctgtaattggcaatgcaatagctaaatcattccccctcttagaaacacagatttttccataataatgttataatgcacaaagccttgtagtttgcaaagccctctccgcacatgtattctccagtaaaatgaagataagcgctggttatccagatcccttgggaaatggatcttttaccacaccgtgtttccatattattttaagcacgtctctagagaagtctgggggtgtagcctaaagcattctgaaagtcttgttttagctttaaaattcatatgaattttgcattgtactttgtaatttttttttgctttaataaaacaatagctaccttctcaaaaagattttagtaaaatttaaaattatatactaggaagatgtctgcttgtcctgtgacattactcatattttttccggtgaatacttatttggcatatgtacgagccagacatggtccttttccaccagagctcacagtacgctgaaggaaataggtattcaactatcagactggccaggcgcggtggctcacgcctgtaatcccagcactttgggaggctgagtccagcagatcactttaggccaaaagtttgagatcagcctggtcaacatggcgaaaccctgtctctactaaaaacacaaaaattagccgggcgtgttggtgcacgcctgtaatcctagctactcgggaagctgaggcacgagaatgcttgaaccgggaggcggaggttgcagtgagccgagatcgcgctactgcactccagccttggtgtctcaaaaaacaaacaaacaaataaaacaatcagactaagtgcaactgtgataaattctcaactgcaaaggcgctaaggtgcacgggaaaacctaatgtggactctgggactaggtaaggctttctaaggaaatgacatttcagatcccccaggagaggcagcattgagacacttccaggtaaagggaaggaaatgtgaaaaggcccaagcaggtggggccgaagtgagatgagactggagaggcaggcagactttgtggaccgtttttaaataatgattttgtcttatgagcctggaaagtcaatgaagggttgccaagagttgggagcaggcaagcaggatcacatttccgttcctgaaagatggctgaggtggtttgtgaggaactgattcgtggagggtcaggatccagggcggagagagtctgagcttatcctacttagtgagtgtttagggttttctgtttttgcactaactgctcttttgattgtttttagttcttgcctctgctctcctgtgtacgcatctaggaggctttcagagtgcttctctgtaatagtttctgttttgttacttttaatccactgcagttttaggaaggaaatgaaccctgttagaatttcaggttaaataagagaatataggttctgagtgagaggctcttttctgtgcatacacttattgccatttggtttgctatctcagagatctttctgcttattttctactttttgtgttgcctttccagttagactaggttcttagatgcatgaataagggttacattattgctttaataatatcctggaatcttacctcgcaggatttttgtgtaaagaaagttatgtgaaatttctctgcaaagtattcagtgccatataaagaaaggtaataattgttagttataatggtagcttagagacctccaaaactaattacttaccaaatgttcatatgtggaaatttccctccctcccccacccccatgaaaaacacatattcctatttcttctggatagcatgaatcattgtcttaagtgctcttgttactctgtgccttcgctggcaggaaactcaaagccaaattttcagatcattgtaggaaatgagtggatccatatggcatgtagatccatgtcttaatccctcctttggtcttgttctattctatttatagatttcctgtgcctgctttattgatgtttttctttttagtagatctcttataaggcactccaatccaccactccaatccaccttctcctgttaacagggtcgaaactgctattcaagtgtttcaggaagcagtatataaaatactggcagccaggcatggtggctcatgcctgtaatcccagcactttgggaggccaacgtgggaggattgctggggagttcaagaccagcttgggcaacatagtaagacccccgtctctcaaaaaaaaaaaaaaattagtgggcatggtggcgaattcctgcagtcctagctacttgggaggctgagatgggagga

SEQ ID NO: 466 - DNA, 8050 bp, Homo sapiens
tggagaaggggaccacagcaccctccctggcccacctgctttcaaaatctattgctaggtcttaagaactatttgtgtcctggcagtggatagacatattatcagttttcactaaactcttctcacaaaagagacaagtggtttgaagacattcctcaaaggaacccatagactgaaaataatatgaacaatgtaagcaaaagcaaactcagaaaatggcaaagttgacgatttcttactactaatatgatatccattatgatgattagtcagctcagtagtagtcagctctgacaactaagttcaaatttataaaaaagactacttgaaacagggatttacaccaccatatgttggcccttgaggtattagctaataataatataaacatgaaatcatgatcagcaagacatgtaaatgctataaactcagggcaagaagacaaacctctacgatttttttttcagggattttccaagtcatgcaatacttagttgtgtactttttaaaaattattttttggccgggcgcggtggctcatgcctgtaatcccagcacctttggaggctgaggtgggcggatcacctgaggtcaggagttgcagaccagcctggccaacatggtaaaaccctgtccctactaaaaatacaaaaaaaattagccgggcatagtggcgcatgcctgtaatcccagctacttgggaggctgaggcaggagaatcacttgaacccgggaagcagaggttgcagtgagctgagatcataccactgcactccagcgcctgggcgactcagtgagattctgtctcaaaaaaaaaaaaaaaaatagtgctcagaaatctcttttgaggcttcttatttaatagtaaaagacaaaatatcagtcaacatcactggaaaaaacagctgttgtatttgccatggttaaagtgactgagttaatacagagagaagatggtagtacataaaaatgtattctgttggaagacacacagactttaagtttgaagaataagttttaaaacacatggtgtgttgtggaagttggctatatggttggatgcaagttgctaacatgtttcaccttgagtatttgctatgctttttgataatgacattcataaagaaatattttttgtgatctactaaaggaaagatagatatgttcacaacagtgaacaacttagtaaaacatgctgtggtttttatgggtgaaagtaaaccactgagggagtggctgccctctctggaatacaaaatgaagggtggttggtgttttgtatgaccagcaagacatgtaaatgctataaactcagcaagacatgtaaatgtctcgttctaccacttgtctcttttgtgagaagagtttagtgaaaaccagaaaacgtaatctgtctatctactgcccaggatacaaatagttcataaggcctagtaatatactttgaaggcaagggtgtcatggtcccattctctgtcccccgtgttgcacaacctcctctcatccctgactatgcctctgatatgacacatggcatggacacctgatgcatgagttgagtaagggttccatgtagttaacattggtgaatgttaattttttttatttttagactaaaaaatatgtagaaataaatgttttaatttttcttttacatttcaatggatcattctacacattctactttgaagactactgatttaatgttacccttccattgcctcagttcaacatgaacaccacctcactagtcttctgccaatgcaaccacttccgctacccctcaccccctccacctctcactgccactgtcaccctcacccaaccccaagcagtagcagcaccaccaatctctcctccaaaactggggggtggttcgtgttctggtccatgaggactacatgtgaaattcagcaatcacattattcatttacaaagtacaacaagaagttgaagcaagaagatcatgaaatactatgggatgtcaataatatggttaattaaaaaattaaaatatagcagaatctttatagcactttgtattgagatgtggaatgagactaaaaatctttcttatgattccaaggtttactgattatctcaaggcaaacaacttgaacgctgtgaatttaaagatgagtttccttaacaaagaacaagtgctccaaatttgctgacctccgatgtgctggcctgagattgtcacaagtgtgatacatagcagaaagaaacacacatatacacacacatacacacacacacacacacacacacacacacacagtatccttttgggtaaaggtgatatttcagcaatgaactgacgtaacaaatgtgctttagaagaattgtgttatagggaaggcactttgaaaattgacgtttggaactgtttccattatcatgtgattttcatgccaaaacgaagcgtgctagtgtcacctatactctcatagccacaatctgcaaaatgtagaagcatacttctaaatccattttacaatattgcaaatgcagaatttcaagtgttttaaaagtcccatttgttaaaatgatttgcaagaacagctgaggaaaacatcattgaaaatgttgatttcatagacaaagaagagttttcacatttgcaaaattgatagatcaaatttaaacagtaagaactatgatttaataagtgcaaagatacagttcttctattcaggtctatttaatctttgtgagatatcttttttttttttttttaaagaatagccattaagaccaagtatggacattaactgaacttacaagtacactttctggtctcataaagtattaaactaagatttatttaaatcatttttaatgatttaatcactaaatcactaacagattagtggaatcactaaacagattattgctaataactttaaaatgaaaagaaaaaggtatattgtaccactcataaaaatgaaacaatttaaaattattgtttcatctttaccacatcctttaatttttttagtgttctttataatatgtaactcattaacgcagtctcatgtgcaaaacgtttatgaatacacgaattgcgagtatcagaccaatcagactatggggtagaaggaatacaacttggtgcttacatgagacaactctgtgaaagtggttgacacagtgaggacacacagtgggtgctcactaatgaagtttcctctccgagcttggtgacttactcgttgagagaggaaagggagaccgagtcaagaatggctcccaactgtggccccgtggtggtgccgaccccggtatcattcactgagactggaaacacagaagcaggttctggcgttttcctgggaagcaactaggtagtttgggtctggaccgcttccgccggcctaggaagatctagaggagatgttccctaggcagttagattcaccatcttcagcagctcgggggcattctgggctggagatgaaattcaagagccatcatccggcaggaggttgttaaaaccatgggagtggctgagatgcccagagtgggccttggagtgggagagcgggctggcacggtgggaccctggggtgggaccacagagaaaagccaggccgcggaggccgagaagctgtaggtacccaggtatgtgaaaaatctggaggtgggggccgcgggtgccaactctggaaactgcactccaagcgtttcaggaaggaagacgtggtcagcaggctcagatgccaggaagaggtgagcgagggaggctgcacggcacccagtggctttggcaactaggaggtcattcaggactttgaggggcaggtgaaggcagagcgaggagggttggagagggagcgtgtgcacgtggtgtgtgtgtgtgtgtgtgtgtgtgtgtgtgtgtgtgtgtgtgtgtgtaggtgatccaagtgaccagaaggacgcctggaagagtggacggttggcgagggagtgtgtgtgtgtgtgtgtgtgtgtgtgtgtgtgtgtatccaagtgaccagaaggacgcctggaagaaaccaatgcttgcgggttgctgcaactacagggagcaagtcacctgtgcggggccgagacccccagagtctcgcgctgggaaaagttgtgcggggaggggaggacgtcgggcaagcccgggcggcacggggagcggtgtggaagcccggcggggccagcgcagttgaggtctggggagcccggctggcatctgctccgggctgcggcgcgggccccgcggagcccaggaggcggcgggtgcttccggccaagggccctggcggccgccgcgcccctgctgctctcaagtttcccgttggcggcgcggcccgggcgcttcaggtagcctctcggctctctctgctccgctccgcgcccaggtagggcaccgacgggggctgcacgcggctggccggcttcctccctgctgaggcggccctccctcctcccgcggggccctcctggccggggatccgcagcgctgcgccctctgaacgcccggcccccgcgcctgctgcggggcgcggcctggccgggccctggccccggctggcctcagtgcccagcagccccgctccgctctgcccagcgcgtcccctttgctccagccctgcggccgtccctttcggccggcggcatggccctgtcgtccgaacccggtgagtgcgcgcgaggctgcgctgctgaccttgggccagccccgcggaccctgcggcccaggcgggaatcagcagcgccctggggtctgaaccgcggcttccgccttccctgctcgcagaggcggtggcgctgactccggtccgatcccttgccctgtcccctgttcctgtccctgtccctacccctgcctctgcggtggcccgagccccagcggcctcaggtgagcgggcagcatcccgattccctggcggcctagaatggaatcgcaaggtttagagaaattaagggacctgggacttgccaccctgggcaaagttcctaggtgcttgaggactggctggatgtggacagctgaggtggacttctacctggaggcgagggatgcactggatgatagggtgatgaggtcgtttgaggccttcatccttacctctttggctctctcccggcaagggaggtgtacagccttgggctctggcagtctgctttctgcccttgatcttctggtagctgctttgccagcagagctgctaatggctgttgtaggctggcagaggtccctggggagagttttgagaggccttggagtaggagaggcttgctaactagggtatcatttccccaaactgtatgtggctgaaagcttgatggcgacacatcagcaaaggagctgggtgaaagcaggcagcacaaggagggattttagcatggtcttgagcccctgttggctttccctcaggatgcagtgaccaacatttggccatcttcatggaaaagctgcctgcagctggaacctgcagaggagaaattctttccctggctgtgcagcactaaggccgagtgttagtggagccattgagccagacagacagagcctctgtcacttcacacctctaggagtgttgacagcaggtctggggtagttggcctggcctggctgcagcttcatggggcctggcttgctctgaggatgatggtatggggctgccctctctaggaataatgacacctgcataggtggtggctgggagactctttgacctctcagtcccatccttagctcagcctctgtcttctaaggttctcctagctctcagctaggtcaagaagctctttgagagatgaggttttttgtagttgtttttttttgcctctacactgactggatcactcttcaaatggcctcaaaatctgtctcaggtcttgaaaatgtcatgggcagataacatgtagccttcgggttaacagggagataccctttctcccctaaagctgcccattggcctccatgattcttccaccaagtataataatctcttagttcttctgtatgctggttgcatatctaggacaacagacaattgctttgggcttttgatttgtaaggaactgactggggcatgggaggatgagctcatggctggagtcctggctgtgtacagtcaccgagaagtaccattcataggggagaaggatgttcctcctcctgatctggcttcacatttaaatatgttttccttcttcctgcacccaggtaatagaaacttgggagagtgccaggcacatggtggtgctcaataaataaggttgaataaaaggattcagtgtctagataaaacttcatgttcattttcctagttcttctctctcgtatctgatatcataatgatgatgacaatgatgttggcagataatgcttataaaacacatactctatgccaggtaccagtctaaacacttcacttatgctcattgtcatggcaacctatgagattggctttttattatccacacttcatagggaataaaaccgagccacagaaaagttatttaacttgcccaaggtcatacaactaagtggtggaacaggattcaaatgcagggagtctagctggagttttttttgttgttgtttgtttgtttgaaatggagtctcactctgtcacccaggctggagtgcagtggcacaatctcagctcactgcaacctccacctcccgggttcaagcgattctcctgcctcagcttcccaagtagctgggattacaggcgcccgctaccatgccaggctaatttttgtgtttttagtagagatggggtttccccatgttggccaggctggtctcaaaactcctgacctcaagtggtctggccgcctcggcctcccaaagcgctgggattacaggcgtgagccaccacactcagcctgagtctacgtttttagccatacactctactcattcctgagattgccataggtggattgatctattataaatagctagttcacttgttcattgttttatgcattcattcattcaacaaatacttgctgaatgtcgaccatatttcaggtatggggatacaactgtgaatgagacaggcgagatttgtcatggagctggtatttagcaagtgaatcccctttgtccaactccttgtgtgagtcacacacacctcacaaatgagaagaaaaatgaacccctctatgcaagctcatgcctggcttttggggaggagagtgatatctttctttttctttttctttttttttttcttgagataaagtcttgctctgtcgccaggctggagtgcagtgcagtggtgcaatgtcagctcactgcaacttctgcctcctgggttcaagtgattcccctgcctcagcctctcaagtaggtgggactacaggtgcgcaccaccatgcccagctaattttttgtgttttagtagagatggggtttcaccacgttggctaggatggtctcaatctcctgaccttgtgatccacctgcctcgggctcccaaagtgctgggattacaggcatgagccaccatgcccggccgatatctttcttgatgagacataatttgattccgtcctctcctgtcttttagagtttgtaaggggtgcttaagtgataaaaggggatgcagtctagtctcgggcaggagaagcgggccctgtatctggttatcataaattgtcttgatgtttgttcgaaagggaaataaggctttgagcttgggatcagtgctcttcagtccacagagacatcttggctgcaagaagcagcaacaagttaggctcaaggtggaattgtgaggtcctgagaagagcttgctcttctgggacagaactgtatttttcttctaaactgcccatgttctggggagtcttcccgccttttggcttcagcaggacccttggtcattgttacaacctgtgtcatcttagtggagctgctgctggtttctgtctgaacccgatgcaatgggtctcatacctgtaaactgggctccaggaaggcagctttctctaagttggaaaatgaagactcaaggtggagggtgtttcccaaagccgataccacaagatattaataggtgttttt

SEQ ID NO: 467 - DNA, 8050 bp, Homo sapiens
cctagcatacctgctgttacggctcatcttcattgatttgcctggtgggggaaggaaaagcaacaggtgagagggcagggggaggggtgggtctagggatctctgaggctggggatcctccactgtgtcagagacaaaatcctcagcccgcccctccttctccagccccaaccccctcatcggtcaccccaggcagcgctcacctgcgcttcttattgcccccacagcggaatcttctgccttgaaaagagaaaaggagatttgtttccatggactaattttccaaggagaccctggaagactcaaaattcttccagtctctcctacctccctcctgccagtatcatcgcagggtcaggcttggaggccacgtttgactgtctctattttattttatattttattttattttattttttgagacggggtcttactctgtcacccaggctggagtgcagtggtgggatcgtagctcactgcagcctcaaactcctgggctcaagtaatcctcctgcctcagcctcccaagtagctgggactataggtacatgtcaccatgcccagctaattaaaaaaatttttttttgtatagatcgggtctcactgtattgaccaggctggtcttaaactcctggtctcaagagatcctcctgccttggcctcctaatatgccggcattacaggcatgagccaccacgcccagccttctctctctttatataaggctggaccataggcatttaagaacctaagtcagtcagtcagtcagcaaatatttactggagcagatccacggtggtctgttggcatatcgagagtagcagcagagactgggccatcatggtgcccccagcacagctgcccgatgaacacctggagaaggatggcagcaactccaaagtggagccccttgcttaggccacctgcctcctgtgcctatgtgatcagctgccacccggcactgccctccgggagctgccacgggcaacatgtgaaaatggggagacctgcaggactgtggcccgagccttggggtgggctggcagtggcacacgtagagagagctgccatgggcaacacgggaaaatggggagacccgcaggactgtggcccgagccttggggtggggtggcagtggcacacgtgcattagaagtccagagcccacaggtgtgcttgctgtatcttctttccatgggttgtgttttctgtgtatttttctttgggttggaccaaaacaagtcaatgtgcagttattaagctcctgctgtgtgcccctcggggcttgaggatacataactctctttgtctcccccagaacactccgagtctgcactggaccgttctcagagcgctgtcctgactgccatgtctttggatgctagccctaatcttgtgaggcaggtgggatcatccctatttaacaaatgagtttgggaccatggttagcagcggggggcctagtccccctgtctggccctccggttacccagttaccccgtgggtttgctctcacttctgcggctcctcccgggcccactggagggtgcacttgagcaagcaggaacctcacactgtgctcccagcgagcctggcaccccaccgggcacccattcccacatcctgcagtggggggcgtggtggggaggctcacccctcccttggcaactcccgaaagccagcctgctcagcggccttgagaagagaggtgccctggtcagcaccccttccctggaggccaccccacttactgaggaggatgaggagccccacgatgaaggccagtccagcgaagatcaggcccccattgcgaacggtctcatagtctccggaaagagagggcaagaggagcgggatgggtggtctctcccagcagctgtctctctccgcagcctgcccgcagcagcccgtggtaaccaggggagataaggggcacagagcatggacctggggctgggagaggccgctgcttggtggaaggggtcctgagggctcaggaagggtgcgcaggggcccaggcttaccatagtagaacgggtccacgtcccccttggggctgccgcctaggagagagccagaggtgggatgagaggagtcaccgatggtgagccagccacaggaacagctggaattccctgtccttcccttcccagaggaccctcgagggtccaagcaggcgaggggaggctgggagcaggggtgttgctaaaaccattgccagcaggcttctgctccaggcggcttcagacacgctcaactggggaccaaataccgagtgtccgagggggatccgtgctgtctggggggcctctgaccactccggaagggtggctctctcctgctccttgattcctaccatggtagaaaaggccaggagaagcctctcccattagactcccagcggcctctctccacaggaccatttggctatcaggtgcttagcagctatttgggaaatgcatgaataaataaaacagaaccttaaagtttatcagacagaaggaggaagccgagcccaatgtgtagacttgttcaaagtcctaatgaaagctgagacagacctcctttcctgcgttaccatcctcaggggaagcagatctagttaagaaacattaatatatagtgctggtcaggcaccgggcaaaaactaacaaaccctaactcatctaaccattatggcaaccttatgaggcgtcaatgtcattctggtgtaatccacaagagggtggaagtgcagagaagaaattcccccacagttatacagcaagtcaggggtagagctggtgtttgaacccaggaagcagggggctgagaatggaggtgcataagccctttgatctgccacctctcaatggcgggagggaaggagcccgttagaggtaaggtcctgcccctgcctctggtggcctcccccggatttggagccgctcagcaggcaggtctcacagtggtgccctgcaactgagtacacttgccccggacagccagacggtggcctggccaggacgcttctgccacagctaagggccgctactctttcctgccctgccggagccccttctcgcacgagggaagtggagcccgaggaggaaggaacgcgcaagttagcactttccgggctgtgccaaactgtgcccctgagcagcagtgagacttagggtctgtcaagcccagctgtccccagcggccagtccctgggccaggaaaggacaggccaggaagagtcagtgcccatcctgacgggcctgaggtgctgggtgctcagggaggccatgaaggacccaggtcccacacagaaggccgtcagggctgtcttcccagatttggttcaggccttgtttaaggtcatatggggatttaagtgtcagagcaacagctagacgccagctgaggcttccccacacgccccaggaaacctcctcctccgtggccacctggccctgagccgcttgctgagaccctccctgcccagcaccctcccctttctgcatctggctcaaaacccacctctgtcagcaagtgcccctcttggtttccaggcctgagtcagttcctgtgacaggaagcctttggagagtgtgacttgaacttggcgggctctcaccccaaatccagcctaggaaggctgaccagaggggcctgctccttccccagccagatggacgccgtctgcctcccgcccaagttcagacggtctagcaagatgcattgaactcagggcgggtgtgtgccaggaggccgaggaggaacgctcagctctccagcttctatctgctgcctttctgccactcaagctatctttctttggggttaaagcagggtcctcctttaagttgcaaattttcttagagaggaggccgacaggaagaggggctgggtactctggaaggctgaggtggcaggagagggaagagtagggtccagctgaccccacaaaggcaggccaatcagagccacccagcattgcacacgcccgggcacgcacaccagcacactcaccaccgtccatcgacaacccagtcatttccccaggtgaatgggctgcctccactcccctcttcctgctgtctctgctttttggagagtgtctggctgcctccacggggtggccggggacgaggtgcgggcattaaacattaacagtgccaggtaatatttaccctggtcacaagaaaagctgcagtgtggatggaggggctccttctgcagggtgaggacgtgcgtggggaggcaggggcagggaggagctggctgagtttccaaaccttcccaaaggaaatttccaaagagaagggttgggatgggtcagcagtcgtgctgttctgccagctggggaagctacagctggggcggtgggaacaggaaagtggaagttgcacaatctcttcagtgtacactgtacttgggagtttctgggggcagtggcccacagtggcccccagcccaggcagggcccaccgcaccagccaccatggatgccgccgctgcagctggtgttccttatgtggtactggaggctttcctgcagtggtccctaggagcctggcccactgctcccccaccacatccctggagcaccgccaaagctgaccagcagtagatcctccagaagggcccttcatctgtcatcctattcacccatcaacgtgcaccctgcaggttacacctcattcagaagggcttcagtcatccccaactaatttctccttccctgccgccctggcacttcctcctaccaccatttggcctggctctcggattgtgtccttgccagtttaccatggagcatgcaggatccttaaggacagggcaagactttcatcgtggggaaaaccccctgcgtttatggtttaccaagcactttcctcactgttttttctcctcaagctttatgtttcccattttactgatgaggcaggtgtctaaggcacagagaggtaggggccttgcccagggtcacacagccagtgtgggggaagtggagactgacaatcaggcctcctgctgcaggaggcagatgctttccacacctcgcaggcagcctccccactccgctgtgacctccttcgccccaggactcctgtgccgggtagtcacaggtactgtagaatcctcgttgagttctagtccattgaattggcctccagaaaaggctgaagcccaatggccacaaaacagccaaggtcagtggccagcggacagcaggggagcttgagcccttctgaagggagccactgtatccatgaatcctccccaagcaggggcagggcttggcacttgagttcacaccctggccctctcacttgctaatggtgtggtctcagtcaatgacttcacctctctgtgcctcagtctcctcatctgtaaaatgggcgcagtacccagctcctagggtggtggtgaggggaagtgagataatgcatgcaaagagcatatcccagggcctggcacacggtgagtggcatcatttttactgttatatgtgtgttgattgaagaaatgacaagcattagcctttggcaaatgtttgctgttggacatggaaaagccagccaccctccaatgaaaatgggcacgaatgagtgagacggagagaatggcatggccctgcagatcaggcgctgcaatacccgttcagctcccttctgcttctggagccaagaaatatatattcgtgcaaacatcacagcagagccagcgtttggtgaagatggaccacgtgccaggctcttggaatgcactgcatcacttaattcctactaatggcgttttacagataaagaaacttgaggctgctcatttgctttccacaatagcccctggacgtggccagggcactgggtacaccagaaaaaacgagggcaggaaggtgaagggacttgcctgaaacacacagttaatggcaaactggaggtagaaagcccagatcctccaagatgtgctaccaaagctactgccatctccacacaagacaagggtgctccctttattatacaggattgtgttatcttattgcatttggtctgtatttgtaagcctccatggagtctttcgggaataataagagatgtaaaaataagtgggaagttaaataaattcatctgtctgtctgtctgtctgtctgtctatctatctatctatctatctatctatctatctatctatctatctgtctatctatctatctatccattgacaacccagtcatttccccacccaaatggactgtctccacttgcctcttcctgctgtctttgctccttggtggggtggctggggatgaggtgggggcattaaacattaacagtgccaggtaatatttaccctggtcacaaacaaagctgcagtgtggatggaagggctcccactgcgggggggaggaggtgcatggggaggcaccaacagatggatggatagatagataaatagagagatagatagatagatagatagatagatagatagatagatagatagatagatatggatgatagatcgatcaatagatagatgaataggaagcaatagggaaagctagttgatggctacatttttaaactctgtgtgcaaggcaccgtttcaagcactttacagaaattaattcttttttttaagacggagtttcgctcttgtcacccaggctggagtgcaatggtgcgatctcgactcactgcaacctccgcctcccgggttcaagtgactctcctgtctcagcctcctgagtagctgggattaaaggcatgtgccaccaagcctggctagttttgtatttttagtagagacggggtttcaccatgttggtcaggctggtctcgaactcctgacctcagataatccgcccgccttggcctcccaaagtgctggaattacaggcgtgagccaccatgcctggccagaaattaattctttagtcatcacaatgagttttagaaggtaaagaaggcattattatcaccccatttcatagaggaagaaactgaggcccagataagttaaataacttgccagaggtcagatggccagagggtaggggaaccaagatttcaagccagcagcctggcttctgagttcctgcatctctaagggacggatggacagacaagtaaatgaggcagttggacagctgccttcccagccctcgcagctcagatatgctctgcacacacgttacagcaggccagtgactccgtatggagatgctcttttttggaaattctgcctctcttcctttctgcttttcctgcacttctggggagcttgtgggtgcacttgaaagggacggggctggcacctgtgttagagcctgagcagggaggaggaatggggctcagaggactcacccaggtaccacctgtccatggcaggagctgctggttgtgtccaggagtgcaggagagcagggaggtgctgcttgcctggggcctggatggagagtggcactccccctcttcacacttcaggtgagcccacaaacaggaagagacacagggagggaggaggggctggcaaaggagcccttacctcgtgcccacttgctggggcgggttggggcaagggatgcacgtgaaagccaggggagattttctgacctccacctggcacttgaggatgggcaagctgtcagatgcagcagagccaaccacagcccccgccctggccctctccctcgaggggctccacactgcagccagcccagggtgcccgaaaagggtacaggagccgggaggaatcaaggagcccactcttccccaggcccctgggctggtggcatgtgagggagacctttaggggcatgtgtgggtcccctgagctttactccgctgcacctctgccctccagtccagctgggccgttggccggaggtatcctgcccaagaccccggtctgtagctaggcatcccctgagactgggaggcacagctgcagcctctcagaggggtgggaatggtttccaggaccctgtcgtggcacctgaggcaccggccccagcttcctgtgtcgttctggcagttggcagagagatggggagcagctgcggggctgggagccgg

SEQ ID NO: 468 - DNA, 8050 bp, Homo sapiens
tgggtgcagcaaaccaacatggcacgtgtatacctatgtgtcaaacctgcacgttgtgcacgtgtaccctagaacttaaagtataaaaaaaaactacaaataaatttgatgactatatgatctttagaagtaaaaacgttttctaaatgtactagcaatagaaaacgtttcagaggaaaacatttaaatatttctatacatcaaaagtatcctaaatgtaaacaaaataccagaagatatatttgttaacaatagggcaaacaagaggtcaatacctttaatacgtggagtccagatcatctagaagataacaccaaagatctcagtggctaaagagacagaacattaatgtgcaattacaaaggaaaaaaatatgatgaccaataaccattacaaaatgccaaatctcaatagtgattaaatccactcacattaaagtgagatatgatttttcacctcttgaatgataggactcagtgtctgtgaggatgaagtacaacagtcaactactccaatacaagactattgtaattctgcactgctccagcttcgtagaaggcagcttagcaattgtgtttcaagtctcaaaaatattcatatgctttaatccactaatttagctcttaggactttcaatcaggaaatatttgaaaatggtcagtaaaagtaagattttttcacatacttatcacaacatttatgtatatatttatatacacacatatatacataaacatatatatcaaccaaaatattctacttctcaaccttcaaacagtggaatgttgtgcggcgatgagaaagtatggtcatgaagattttttaaggcacataaaaatgcttatggtttatgataggtttaagggaaggataaaatatgtaaagtggttttaaatatgcatacaatgcatacataatcctgaaggaattgtgcccacatgtagatagtagataaattttttcctatttaatgttatttttgttagaaatctttgagttatgcttggcagaaaatcggtcttcagtcggtttaaacaacagcaaaagagggggaggtgggatttattctttccacctatttattctctgaaactgaaaattccaggcctgaggtatggctccagtcaaagctagataactgcagaccagatattgtcaagggctgtgttttgttcctttcatcctgtgtcagctggcctcctgggcatggtgggtctggacacttccttgtggtagcagaatggctgaagcatttcagatgtcacatcttccaagccaagggaggttttttgtttttttgttttgttttttgtttttttgagacaggttctcgctctgtcgcccaggctgaagtgcaatgcgtggtctcagctcactgcaacctccgcctcccgcgttcaagtgattctcctgtctcagcctccccagtagctgggattacaggcacctgccaccacgcccagctaatttttgtatttttagtacagtcggggtttcaccatgttggccaggcttgtctggaactcctgacctcatgatctgcccgccgcagcccctcaaagtgctgggattacaggcgtgagccaccgcgcctggccgaggtcttttttttaatggctttctctattgatgggtgaagcttctctttcccatgggcactaacagatgtctcctcacttctcagtggctgttactgagttatgtgtcaatccctggatcagttgctgagtccggtgggatgttacatgtttgtctcaaaccaatcaggttgtacctctggagcacatcagggcaatcccacctaaaccccagggctaaaaacagaggagttctttcccctgaagcaaaatctgggttctcttctaggatggagaacagacccaggctagcaaaagcaatcagtgttcactacaaggtactttcagattgtccacagtgaccttatactaaagttatgatcagaaaagtattaatgttagaatcagaaataagttataaacttgaggaaaaagaataaaaagcttcctgcccctatgaagaaatattgaagtatgggaagcaccccaaagaaatatgggaacttaacaagtttgtaaaagctctgggatgaattagaattcatttcataaaccacgtgggaggcagtgccatggagaggtgagtgtgtcttcagaatcttaggagaccccaattctttttactagttatctaatcttggacatattgcttaatgtctttgagcctctcttttctcatcagtaaaagagagataatattatactaccttcctcacaagcctgttatgagattaaacaaatatacatgtgctaaggtgaacagagagcacttaaagaatgttatctttatcattaataataaacattatggagataatttttaaaaacacataataaacaccctgtatgtattgtgctaagagaggatgacttgattcatctttttaatttttctcagccttatctaatttttacatatacacacaaatcttactcatctcacaagtgttgagacttaactgcgaaaggaaatagattacaggagaaatgtaatgccttctctacaagcagatttcttaaagagcaagaaaaacatcttttttaacacttaactttggttgctataatcatagctaatacttatttggtgcttttcatgtatctgagcttaatattctgtttttacctgaagtaactcattgaatcctcaacaactccataggttaggtgccatagtattcctaatacacaagagaagatattgaagccccagtggagcttgtactcaaatagagaaatctagccccaggaccatcctgtaatcactccctttactgctctccacaggtgacaactggcctctgttactatcaacaacaagatatggtttgcttggtcctcagtttcccttctctgaaacttttctgtcatcacgagcagtcacacaccttgagtgcatggttctggagaaagtagatgtaggggaaacagtttaaagatgcctctccaatagtgtctagtactgtgtatcaagtaaggaaaattcatggcgcctttaatgtgcgtcgttgagtggtgagaaatctgcttactgagaaagtgaaaatctcttactggggattatgcagtcaaaaatacagtggactagtggcgtgaatcttgtggaaatacaagtacaaatgactgccagtttaaggtcgtaagatctgagtgtgaaaagtgtgtgaagcttttatcagcagagacctgctgccagtaccaacagttagctcagggcacctctgtgccagcttcactggcagtgctcagactctcccctgctacagtgattaagacaaaagctagcacctgctgacacttcaattggtgatagcttttctgttgcaaggaaatgtagctccctcatggagtatgagtgagcaaaaaacattaactcacaacttaaataatttagtaattgtagaagggatgttttctttggttctacactcatttttttccttctaccagagtatgctactagttgttccatttttatgctgtctgaagatactcttttttaaatagactttttttagagcaattttaggtttacagaaaaattgcacataaaatagtttccagttccttcccaccaccccctgcacccagtttctcctctagttaatgttttacatatgtggatgcgccttcttttcacttccatcattcctttttctttttaaaaaatttaacatgccagactttctaccaccgctggtatcacttatgtgagatttacatcactttacacacacaccttgttaagtgtgagttcagtttttaatagtacaagtgcagttattggtgagtctcatgctactgtgtttgttgtgctttcagatcctattgatcatcgcttcagttattgggatcattgtctataggctctcggtgttcattgtattttctgcaaaacttcccaagaacattaatggaacagacccaatccagaaatacctgactccacagacagccacgtccatcacggcctccatcatcagctttataattatcatgattctgaacaccatatatgaaaaagtggcaattatgattactaacttcggtaaggtcctactatagcttaggtaacttctgacatatttttagaacctgccaaaaatagagactgttatcttttaggcgtttcaattccagtaggttacaatttttagaaattttcaagtgtaaacatattttctctagcatgtatggaaataaattatctacagctttgcattagtaaaagggacaaagcaaagacaatcatcataacgtccaagctctctgtaaacagatcagtgctgaataatattttcaattacattagatcatgtactctattgttgaaagtcaatagtctctttattgcaaataagtggaatagggtcatggttccggtggcaaatatgttcctcggttgctgagaggacaagctatcacactgctacgtgtcttccctgtgctgtgctgttcatattaatataattctcatcagcccttgattttttaatgtgtttcttctctctggcttgtatcccaggcagctgtttagtggccaagttaagtgcttcccacactgcatacgtctgagtcgttccctgaatggcctgctcggtgatcatctaaaatgatcaaactgatgcaaactccacactaggaggatgacctattttgtttttcccaaatgcctctagcaagttgtaccttggtttgcttgttttcttcaatagacctaccttatcgcaattcaggaaaacaagagaatatcatttagcaggcagttcaaaaataattttctgtcaattatacccatggcagttcttatttgataacactggacttgtaaattttaaggaacagttgatttttttgtggggcaggggggaacatgtgggctattgtattcctactgtgagggagaactcataacaatgtgcaaacttggaattaacacagtggctatattaaggaattcaaaacagcttaaatggaaacagtgtgaattgtatttttttaacgtgtttaacgtgttaactcatgtatcagtattttttattagagtctcaaagctgttcacaattttaaaatcttatttctctttcttttaactacagaactcccaaggacccagactgattatgagaacagcctcaccatgaagatgttcttattccagtttgtcaactactactcttcatgcttctacatagcattctttaagggcaaatttgtaggctatccaggagacccagtttattggttgggaaaatacagaaatgaagaggtatgaatatataattgtattatcttgccagtttaagctgagttttctctcagttgcccaaatgaatagttttttattgtaaattccttagatttattttttagcctaaacagaacaaatgtcagaaaaatagaatgcctatatttcaagttagatccattgaatatttaaatggtattttctttttaaccttctagtgtgacccaggtggctgtcttcttgaactgacaactcagctgacaataatcatgggaggaaaagcaatctggaataacatacaagaagtattattgccgtgagtgttaaattgtatagccatgggtaaaaggacaagggatagaacagcccatccacacaaatcatttgcctacatagccacatagccacatagctgcatgtccacctctaaatggatcagaatctgttgtcattaaaggtctccagacaacatagtccaaccaacaatgcaaatgtatccaggatctaataattgtattttaaaaccttcattatatttaatgtaaatccccatctgctagagtttatacctactgggctattgttggtgactgactaatcacaaccctttgagcgacagcactggttagagctgtgaactgtgtatttccacaatttcttatatcctcatatccttctcctctctttcctatatattatgcatttaaaagtcagtatgaattccagtcactatattaagtgctatatatatatatacatcatttaatctaccaaactatccttatttttatctcctttttactaatgaagatctgtggtttaaagaggttaaatgatttacccagtttcacattagcattaagagactactgtaggattcaaatccaggatcccatgagtacaaacttttaagaatagaggttctttcatgatcctaaggcactaggatatataatgttttaagaaataattgtctaaaataataatcacaaaggctttgacttactgttgttttcctaaaaaatgagaacaacagaatagttgtacttcaaatgttaactaagatttcattgccctttacaattttcacttaggccccctccactatcaaagtgtaaagtccaacaccatctgcaatttctgcaaatttcagggagctttttgtttgggttttctattgctgctataacaaattaccccaagattaatgggataaaaataacatgtaatattttatggtcccgggggtcagaagtctcactggactaaaatcaaggtgttagtggggctgtgttcatttccaagggctctggggtgaatctctttgcctttcctagcttctggaggccaccatctatgctccctgccttgtaacctcttctccatcttaaagccagcaaagtttcgtgtttgtgactatcttctgtagtcacctctcccgccttctgtcttcttccccctgtcctcctcctctcatctcccccaccacctcttcccttgtttagaaataaaaaacctctacctttataaaaagtcttttatcccactatatagctgggaattttttaaaatttatcacccttctttacaggctctcgcctcctgccatgttgccctcttgcctccatcacatacaacttctctctcctttcttctcctactcctggcttttttctccccagtcaccaagtttctgttcattctctttattgagcagttaactcactccgggtttcagtgcctccttccagatttctttaacaggtcttattctccatcttcaatggaaactgtcagggtctttctctaaacaaagatctctctccttcctcttcccccacccagaaagggattctggctttagctgtgaaattctttttttttttttatcctactccggagaaaacaaccctcactttcattgagctcatattcagatttttccagataagtaaaagtaggtcatgcataaatagtactgtgtttctagatgaaaacaaatatataaaattgaggaaagtcttaatccattctgagattaaaaagggttttctgaaaaaagtaggttaattatttaacactatgtttcggtaacattggtttttagcagctatttcctaaactggaattgagaaattcatatgaaatgaaatttgttcacatgaaatattttaaaggatgaattatactatccgtggtttatactttcacttcaagtaagctcattgttgaaaattacagtgatatgaactttgccttcaaatttctccccctatgttttcttgtttgaaaactgagaatgctgagtgttagccaaattagagagtgactggtgctgcttctctttgtgtaggtgccagttttcttaacttttttatacaaagtcctaatttatcaaagatatatcagccaggtgctgtggttcacactggtaatcccagcactttgggaggccaaggtggtcagatcacctgaggtcgggagttcgagaccagcctgaccaacatggagaaaccccatctctactgaaaatacaaaattagccagacatttggtgcatgcctgtaatcccagctactcaggaggctgaggcaggagaattgcttgaacctggaggcggaggttgcagtgagccgagatcgcaccattgcactccagcctaggcaacaagagcgaaactccatctcgaagaaaaaaaaaagatatatcagttatcctttctatc

SEQ ID NO: 469 - DNA, 8050 bp, Homo sapiens
agatggggtctctgtcacccaagctggagagcagtggtgtcatcttagctcgctgcagcctcaaactccctggctcaagtgatcctcccacctcagcctccccagttgagaccacaagcatgcacccatcttcattctttgtttcttatccttgctggactactgcaggggtcctcctggagatgagattcttccaacctgaaaaactctataattatttctgccagagccaaaatcttcctggtcaatggctgaaagggggcaatgctcaacatggaaatgcatacctgccacgcttagcaggaatctggcggggctgaaaacccaccacatacaaggcactctcaggaggcaggaactgggccactgtcttagtttcaattcctgaaacaggaatctagatgcacatgtttactggggatatgatccccagaaacacagtgagggattggagaagcaagatagagagaggtgggttagccaataaagggggtgtacatgagcaggatgctgcacagagcacttgggttttacttcctctggagtccctctcaaaggctcagtggaaaacacctcgattttcctgttggcagggggtataaaaaaacggagactttttttttttaacaagctccatccttcattggttaagggttgctccaggcccctttaactctgatgctcttctgggcttccccatgcatggggcttaacaaatttctgtggccagagagagccatcaggcagagatgtggaagctttaggtaagaagctacagtgtgtccatgaagctgcagatgacctgcaagggaacatgctccatccacttgcaacagccatcatgacagtaatgtcttctcatctgtgtgcccaaacatgtgcacatgtgcatacacacacacacacacacacaaatgcaaattgttgtacctttttctcatttgcactccccctcaccatgaccatgtaaaaatcgagtctccaaatagtttcagccctgctgagccatatagccttgccttgcaatacgagcaagtagaagcagttatctgtagcctcccaggccccagctactccattgtaaatccatgccagtttctaacttcagcccagctggaaaggctaggacttgcgttggctgttttgcttaagccctgctgaagggcaacatggggtgatgggaaaaactggaacagatgtcaggaatttgaggtttcttgtgtcctgtccgccagtaagttacataacttccttagttgacttctagaacttagtttctcccttggtagaactagagtaataatacccgccctatttgcctccaagagttgtaggaagactcaaaaggagccaattcacgtacctgggatcaccttgacgtggcagggatgttccttgcaaagccttatcctgctcaatcttcacctaattacgttggttttaggcttgaagcaggggccttgctggctgacctctcaaagcctccctttcccttgttcccatgtgtagcattctgttttgggagcacagaatgtcctctggtctagaggaagctaagccactgtttgcaatcagtccaagcagatcaagttaaggaccaggccattttggaggcacacaaggactcctcttggcagatgggcacgacaggcttgcttgcagactgagtggtgaacagccccttccatctcttcgtttgcttgtatcaaatagcaaattccagaatcactatacagagtggtggatggggcaatacaacttacccaaaatattaataggcactcatgagggcaccagctgttgtgactagtctgtgtcattaaggcctgtgtgatgtcaacagagaagccattgttggctggacctgcccccaccagctcaaccagggagtgtttgtcagtcacttaggaagagctgccttaaagggtgagtgtggttctcaaaggtgggaaaaactaacaattcttgaagaggactcaaggtttattggaccaccaaatactggagttgatgctgaagtctataacaatggtaacaatactcagggtgtatccattgtgggcccagccaatggatactctggggagtattgaggggaggggtgttgagtccttctacacaggctcagaaagaaaggttcttatcatccacttagaaacaatggaagcaaagtaactctctgggacagaaactttgtcggtcagggagaggcttgaaggagactctaaatggttcccagaatgaattcccacgtaaacctaaagaatgctgatggagagaagccactgctcattcttctttttaagccaaataatatccttctgccggaacaaagttgttcttggcacttggaagtaaatgtgaggagggaatcaaaacacaacgcctgagagacaaatccataagaaatctgaaggccaggacgtggtgaaaagtaataaagatagaagggtcagtggcaggaacaaagattaactgtaccagaggagatggcgctttggctctgaaaataggattgagcgaaagccggaagtgctgcagagacgcacgtgtccttcgtttccaccctgaaggctcaaaggaaggccgctgcccagccacgcggaggctgcaggacagggttctggaagctggggcctccttgccctaatcctggaaggatattccacatctaaatcaccgaagcttcatcctgtgatgcagaagctctccccttgtgaacaaccaacacaggaagtagtgaaacctggtagagagaatattatctttctccaccttcaattataccagaactgcctccagggactttggcaggtttgacaaatggcagaagaatttagaagattttctttgctggcaaagggagccaatggttgggcacaaatgtgctgctgcggttgtttgtacaatgaaactctagattgtaggcagaaatgtcaggttcctttcaactctcttcagagctaatctagttcccatgtgcaaactcaatctatagcatttgggtaaagaatactcagtcctctgctgtgacaagaacaaattcatcacccacaccatacattgtagctaagggcatcatcgtgcccacatgaatcaccaggcagagacggctgccaactctgaaattctttactcatggaagactcacgtatactaatgccgactatttacgcaagcacatttctccaggtggcctggagcagtttacaagatgctggctcattcctcatcatgccacttggaaggagagcaaaaggtggggaaagaggaagggccaacatcatcatctgcattttatgtggggaaactgaggctcacataagccgtaaagtgaaatgtatagacatttatgagtcagaaatcgaccatggaagaggcaaaatgagcttatctgaatcatgagtggactatttcttgcccaacaatttcatgcagctcttccaacacaactgttttgatacagcagcctcaaaacaagccaaaattcagactcgctgtatttggtttataaccagtttcccatctttcattccttctctgacttctacctgacttctgaatttggttgaccctgtttttttgtttgtttgtttgttttgttttactttaaaagaccctcaaccctcctggagtcctgacctgctatttctttcattttgaacctctaccagtcctttccttcatctgttaccaatccatacacccttgatgcctggaggtaagattgacaatggagggggggaggtgaagatcaaggttgaggtgaagctcacagatggcctgcaagatgcctattttactcatcatttattttttaaaaagctgaacatttatcggctgaatctttgagccataccaaaatatcctcatgtcaaaatagctgcagtaaagtggttctattaaaatagctgcctccaaagaactgagagtggagatgtcacctgcttctggcacctgactttggtcctcttctgcgtggcattgccttctgctctgctggattctggcgtatggctcatcagaggaggcactaacatcagggctgccttttatcttgctgatccaagcgaggactatgtaggtgtcacagatgaaactcgtccagaagccgaacaggatgctaatggcatggccacgtgtttccagcaccctgtgaggcagctggctggcatcaatcctctccccagcttccatcccacccccatccacccataagctcttcttgggtcagaaatgcaattctttgatggtgccagacagccagatgatgctggaaagaagaaagaaaaagaaaaagcaggtttctaaattaagcacaaggctcgtttataaaaataaatagccacagcctagcaacgtgctcacagctcagctttcctccgtaataaaacctctgtggctgaagcctgggatgacacagccttcagagggccccacgccctggccctcctcatgccctggcctctcccaggataatactcacctggagagtgctgacagtggtacttttggggccccactcttcattcaaggccaaccaaaggccaggctccaaaaagcagaaggaaggcagagcttaatgaggcccatgaacacttacagactcttggcagtaactaatacacctgtagcaaaagtggttgaagttccttgggctactctgttgaaataggaacttctagttaagaccatgtcttctttgttcaccattgaacagtactcagctaagcacagggcacgtattgagtactcaaccagtatgtgaggaaagactggttagaggtataaatgaatgaatgaatgttgccatcccattattgatgctctccaaactcttcactacaaatggagtcagttccagaatccaaagccagcattcttctcctgattatgacatgcaccaaagaggcatcccctgagctggatgtttaaatcagagcccacagctgaagtgagcaccaagatgtactgagcaagtgtggactcttactgatccaagtggtgaggctcttacaatgggcaagggcagagggcatgcgatatgtaggtaactattgttagcattcctgaatcttctcctgttctttaggcagcagcagcttcaagggtgaactgttgctcagcagagaaatggcaggaaaaaataggacattcgcttctggccttagtcctgttggaacacaaaaagtggagtctgcaatgctgttggaggctcaacaggtcaaatacatcagtaatgggcatggtatggctggggtcatacggagacagtccttagagcactgaaaatgtgatcatcctgaatcccataaggatccttatgaggttagaagggacaatgtggctccactttgatgactgacagcagttgctttggtgagtttctacgtattcccttgtgatcagagagtggtacaggacagcatgtcaaaatcgtaaaccaccatctcagagcaaggccccttagttacaatattaaaaagatcagagaaattggcacatagcatcatttagaaatctgtcttcaggcatctttgtctggcctggctggaaatagtaaaaccatatttatgtcattgagaaaaaggttcttaattaaattcaaatgtataagaatatatcgtaggtctatttttggaacaataatctgggaacaaaaaaaaatctaaacagcaacaaaacttgtacaatagcatttagcttcagacagcagcatacaatagagaagaaggagtcctcatagactctggactcttagattgattcaatcccacaagctagagcaccaaagtcatggcactgggacatttaggaagaggaactctagcagtgacctgattaggagacagctccagcagagagtcagcacatagactggccaagctgcccccagatctttggtgatatctctttggtggagataaaggaagccctttccaaagcagaccaattatggcatccacaaccatagtccctgctccagcctagtgaggacacagtatgttccataagtccctaaggctctatgcccagggctcccacttctgacacggctgctcaaggataagaccccactgaccccattctctatggagggtacagaaatccataagaacagagcccaatactcagctctgtgaccttaactacttggaaactgattttctttgttcataaaatagagagagtaaaaataatgctttctatctcccaagagtgtacgaggatcaaatgaaacactattatgttcaagtgcttcccagtctgcaagctattgttccatgtgaccatgttttataaaatgtaaaggtatacagtgagaagtttgcttctgatgtgaggattgagacttcctttgtcacaaacttttagggtgctgtctggttccatcttattcataatactatttttttttcagagacccctagccatttccttggcttcaaataccaaagacctagcatttcaaaattgtgtttctgtaactgcttctttcctcttacaatccctcagaaagtgctgcaattctagaatgcatgaggaaccttggggctcacaaagtccaccacttcactttgcagatgtacacacagaggcacagaaagtttaggcacttgtccaaggtcacgtgtggagtttcactcaccctatcctcagcttctcccacagcctgccagtgtctgccctccagtgggtctttgagggccacaattcagattccactcttccgcagctgggacatccatcttctgccctcggacatcagagctccttgtcctcaggccttcagactccagggtttacaccagcagcattcccccgctggttctcaggcctttggtcttggactgaattacactatcagctttcttgggtctccagcttgcaggtggcatattgtcactccataattgcatgagccaatttctataataaatcccttcttagatagatagatagatagatagatagatagatagatagatagacagatggtagatagtagatgcatacatacatacatacatacatacatatcctattggttcactttctctggagaaccttgactgatacagattttggtgctacactccctcaatactgaccatattttcccacttttaagtgagtaattgttacttaagctaggtgtgttatttaggatgtgagggatggggagccggaggatggtagacagttgagggcaagtggattaaagcatggcagtaatgggaacaggcacctctgtgatcatgatgcctcatcttagattatacctttggaatttgccttttgtttttgaaaaaataaatatataaccatttcatttttgtagttattcgtaataatttgcttcctcacagaaatggcagaatacattcatgcaaagcatataaatgcacccaagttgttgttgagttgttttaaaagaatgtattaagaagtaggatttgttaagtgacaattcttctaccatcggcccaccttcctctctgcagatgaccttgtatctacccagtaaagaaaatatgaggttattttgtgtgaaacacccccatcacccctacacctacctatccatatgaagccaaattctcctcctccttccctcctccccaaaccacctactcatacaaagaagggtctttctttctgtctgtaattacaaatctacatgtgtgttagacctacggtgaccaatgatcctggcttactcaggactgaggagatttctgggacacaagactttcagtgttaaaatcaggaatattcctggcagactgagacaagctggtcaccctggtaggccccatacctcacccagggacctttctaaacaaaccacgattgaatgaattgatactaaatagcagcaaattgctatgtgagattggtggtcaggaagataactagaagggatgaatgaatgaaatgtagtgatttttttttaattaaaaccttcatgaatatgttgggaaaaacccggaggaggatatcctattatctagacgagcagaagaacagaaaagttacactaaagaat

SEQ ID NO: 470 - DNA, 8050 bp, Homo sapiens
actgataaacaaatgatatttatttataactatttgattcttaaacatttatcttgttataggttcttctatccttctgtaggccaaagttaagttgtatgtgtatatacactttgaaaagtccaccaacttgtttaggtgaggaaagtgcaatttatcatactgatggtaaggacaaatgttccctgtacattattttcattacacaagaacagatggctgtgataattgtctcttactttatgcaaactgtgatttgacctgaaactccaattaatagcatcttttcatggcatatacaggagaaacaatttctgctacttcaaactggtaacaatatctttattggagaatctgaaaaaaacggagccttatcagctatttcagcttacttagagaaaaacagaatacttttgtttaatatataaatctttgtatagtattcttatttcttgagcttaattcaactgaatattctctctggacccatgaggaagagtctcactcttttaggccacctttcagagcagctttggactgtaccctatgctctgaaaaggatccagaaaagtaccccaagttgggggatgagatttttacgcagtaattgttgactggtgagacattgactctgtttgacatgaatgtttatggttgtgttgaactgaaattagtaaattataaacatttaatttaccttatcaaaatcctttcacaattgtaattttaactcccttatatctttgtaggtgggaagtacagacaggtgatgatacttgcaaaaagtttcctgcaagtaagtggcagcattggttctataacctggatctcctgttatctagttctttccattatgcctgggtacaaagaggaataactgtcttctctgtaacattttccttaatatctgtaaaaatgtttacatggcacacagaatgttctaattgtactagaagtaaatcaaaagaaatgtaaaaacatgaacatatgctgcctgttacatttaccacaggaatatatagactatattgtgtttactgctgacatatagttaactgaatatcattttagtggcattatataacacattttgctacataaatatttaatgagatgccaccataaagctaagcagatatttttctccaggatattttagaattgaaggcatattaactgacagtttattttaaaatattgtttaaattgcaaattttcatttataaaaacaaaggtaagagaaaaataacatttgagacaagattaagaatgaatagtgtttagaatagaaaggaaaagaaaatctttgctcagtagcatgaacacagaataattgttacaaatatgttactgattcagtgacttcatttttttattttgagacagtcttgcatcgtcacccaggctacagtgcagtggtgagatcctggctcactgcaacctctgcctcccaggttcaagcaattctcctgcctcagccacccaagtagctggaactacaaggcatgcaccaccatgcccagctaatttttgatttttcagtagaaatggagtctcaacatgctggtcaggctggtcttaaatcctggccgcaagagatctgaccgcctcggcctcccaaagtgctgggattacaggcataatccagtgcacccagccctgattcagtgactattgaaaccccaggaattcaaggataatatcaggatttaggaatgtgaactgcttaaaatcacaaagtaatagtagtggtttctattgcccattttaaagtatctacaaaatcacttttttggtgttataattcttttaacaagtacgttgaataaaggaatatagttaagtactggcactaaataaaaactgctaccaaatatttgacttataagaccattattattattattattattcatgtgttattatttttcatggagttttgaagaccaaaaatatctgaaaaacattttaatctggccagttgaaaactagtgaatttcaaccagatgtttttaataccactttaaaaataaactgcagccattttattatatcttgagtgtgtaagatgatgatttatgcctgtgggaaatacttatctgcaggacttgctttatcagtagaaatgactaatatgatagaatatgaatgacaacttttcaggtctagtaataacctgtgttgataactaactgcccaattttggaaacctagttagtatagttctttgctgtcctatttttgcagggcatagaaattctggcccatgggcttttgtggagatagaagtaccattaactaaaacataaactatatgagaaaactggctgctaacacattaacttccttattaagtaaataaggtgggggagtaatgtttgttgttcatctaacagatgacaagtgaatgttaaaatctgtcatccttctgtcttattttttttcttggcagtttagtaatcctcatattgactgaacaaaaattatgtgtccttactgttttggaaaaaatgtgcaaaagatcagagaataaatggtcttctagcctacttatgtcatgtttcaagggttttaacattcttttgtggcaggtagatatctaaatctcaacccaggcagcaccagtgtctgtctactcataatttctattgccaataaaacaaatgatttaacatttcaaattgacatggggcttgacagagatttaaaggtttcttttggtcttaatagatcaaggataggcttgtcataaaaaaaataataatgttgtggtttacccatcctaattaccttgtggctctaaattctttttcctgacagagtgattaattttttagttccaaggatactttgtagggcaattcaacatggactataattagcagtttaaaagtgaaatcaaaatatgaataaaaaactagctgtgaactcaagttttgaaaactttcaaaattaaatgtcattttcaaaaatttaaattcgactgttctgaaaacagtggtgtgtgcccagttaggcttcaatttgtgctaaatgaaatccccatcagtactaatatgatttaataggttatatgtgagaatagaatgactgtaaacatggatcacattcaaccgggttaaggagttgagaaaactttcactgattgctgaaaattaatgacatttttttcttgctgtaaacaaaatatcaatgttccagccttaactccacagttggccacttgcaaaagctaccctttctagtctccaaggaattctgggagactctgagcaaggccacagctgaggcctggacactatcttcactgctccatctcatccttgggtatgcaactcagtgatgtaaagaaaagctccttccaaccatcctgaatccctgccctgcactccacagccccaactaaatggatcatttaaaaaatgaaaagcaaattcatgcacatctcctcaagagttgctcccttccttctaagcagtgtgggcatattataaggatcttcttcctcatgaggcttatttcgtttatgtctgtgtgtgtacagggagcaatagataaatacaaaaaataacataattaaaatatatagcatgccacacagggataaatactactgaggaaaataaagctgagagggaactagcgggtgtctgggtgggtggcgctgcaaagatgatacctgagcaaagagctgaaggatgcaggtaagtgacccattcggatctcaggtaactggggaagagagcttcaggctgaatgaacaccaaatgcaaaggccctggagtagggaggtgcctggcgtcgtttgaggaacagtaagaagcagtgtggctggagcagagggagtaagtgggaggcaatgaggtcgaaggggccaaaatggaagaggtcatgtaggacaggctgagaagcgtgggaaaaattggagggttttgagcagaggagtggcacgacagaatatgttgctaaagcctcttcgtgtctagccatggtggaaatatcatcaaaagagactggaaagataaatctggtaacaggtgtcccaaagtttgcacatataactactgaaagaggaaagggcttgaattccggagaagtgggtgtgtgtatagttgggaggagaaggtttccctaggagatgcacctgtctggcttccaggccgcgactgcgcaaactccggtcctgacactctagtctcaggtcccaactccggaagggttcaggcccaagcctgcacgtcgcgttgccatggcgaccgctggctgccctctccgctctgtcttttgagcacgtggcaccaggaccccgcgttctctccagctcgagagccaggtctggcccagagccgggctcatcagtattccgcctgcggcgtctccccgaccctccgccgtgcctcaccaggtccgcctatccagcagcgacagactcccgccgtccgcgcgaccccaccgcccccatcccagtccctccccgagggttcgcagcccgccctgccctcgagcgtgcctagcggccctgggcactggcgcggctctacccagctatgcagtgctttcccacacactggccgcggccactggctgcagacccgccgcggaaagggggcgccctgagtcccgctcgcaggcagcgcgccccgagagacccgctctaaggcatccccgcaacaactctgtgggggcattcaactcccccgtgcgccggttaagattcccccatgcctcctgcaatgcaccagaccagggaggtaaacatcgaaggcacctgcattgcgcccccactgggatgcgctgtgcgcaagagacggggaccgtctgctgcaaaaccggatgatcggagacgcagggagttaggagtgggttttcttaggactcaccttatgtagtttccacatggcccccagagccttgacttcgtggctggagtgtttgccctcctccaagcactggtagcacacgggcatcttgcattgcacgcagtacatgctgtggttctccagctcgtggtctgtgcaggtggagaccttgcgtgggctcagcctccggctcacacgaccctgggccgggggcaccaggcggtgcttggctaggggcccccggggcgggtggcagcgcaggcggcacggatcgcagtagaagacatcgcactgttcgcacatgacggtggcttccttgggcgccttctcgcagagctggcacttgagggccgcggctttgctctgctggtagcggtcaattaccccttccagtacgcgattcttggggaagccgcggagcccccggtcatccaggatgaggctgcggtgacactgggggcaggtgatacaggagttgcggggcaccggggccagggccggtgacaagtgggtggccggtggcggcatagccgggggaaacacgcggacgccgttgggggacttctggcacggggtagtgggggcgctggcgaaccccccgtaggagccatagccgctgtccgcctcgctgtataggctcatcttgtccaggtccagatagtcatagtcggagaccccggagcccgcggcccgatggctctggggggattcagactctggggtctgcaccaggatgttgcgggcgcacgcctgacacaaattgtgagagcagggcaggatgatgggctcccgatagaaggagccgcacacggggcatttcaactcctcttccatctcctccatggggaccggtctgggaggagacagcgacggctgcagcgggtgcctgagctggcgaggtggccgacgggcccgtcttgtccagcaccctggccagcggcggcggctgtggtggtggtgccttcccgcgcagcactggcacggacacccagagaggcgctagctctgtgagccgcagccgcgtagccgccgcgccgcgcgccagcccggaccgcccctacctgccctcctagtcccgccccggcccatgagcagcggcccattgggcggggggcaagagatcgaagctctcattggccaccagacccgtccgtctcctcgtctccgcaggccacagggggttcggtagagtctgaggatagggcagtcttcgctcgcggctgcaagatctctgaagggggccggcgtgcggaggctaggggaccgggaaggaggagttaggcgggatgattcatcctcgcccggcttacttccgacctccggtgcagtctcccaggagctgggggcgtgagaaacccctccccgcagcgagtgggctgccggagggggctggggcttctcgccagcgtttgcgtttggctcccagctctgagctccgcgcccacctaccgcgggcgagtgctgcgcagcacggaggacgccccttctcttccgctgctggcagccttcgcaggcgtctcacccgggcctaggcttctgcacggcagtggggcttttctccttctccgtgaatccgctgacgccgtgccctggagctcccccatcccgggagtctgacggcgctggcgcaagccctggcgacactcttggcttctttcatcctgcgtccctcgtttcctaaagagcatgtataaagtcgatttcctagtgtcgacatgagattcaactgggtaaccgatggaaatggtcagcattagtcagaatctatgaccccttcgtttcatgctttaaattatagctcggcccagaggcctcagtgccgtggtgtgaacgtgcttccttccacggatccttcttcctcctcgcggcctcccaaagcacctggctgagctttttcgaggcccgctgggcctttggttcggttgaggcaagaacagtttgtctatttctgagtgcccgtagtttagtaaagctctgtaaatgaatcactgtgtgactgcggagtctcagtgtttcactccaaacagcattattcaaccccacgtgccctgggcatctgccatagcttacagcatcgtgtgcctttctgtttcttccaacgaggggcatggtgaggcggtgattctagtgttagtccctgtacaaggagggagggagggagggaagaagggaaagagggagagagggaggaaggaagggggggggaaaggaaaggcggaaggaagggaagaaagggagggaggaagaagaaaaggaaaggaaaatctttgagtcaagtgacattctgaggtagtaacatttgaaatagtacatagccggcttttgctgaatgattcatgaagtaaaggacaaaaactctttgcaagttctagaaatattccaattttccaccttccagacaggagataacttgattatatgcagctatgttgataatttaaaagtactttattgtccagaaaaaaaatggacattttattacactgcccttgtagaaattgtccaataaactaggttatcttttcaacatctttagttgcagtgagaacagtagttgatcattgtgtgggggaataaagtccccattgttatttaaagccatgttaatcataaatgtgacgtgatttatttttaagctggctttcaactagttgagaccagagcatccaaaggtatatgcactctgtttacagacatagataaaatttcttcaggtatggttgggacattagctgcacttgcaggatacacttaatttataggtcccaagagaaattactaataattatattcaatatagtattaattgaattgtaatgaaagttaattattgagaaaatattagaaaggagtgtccttttatggcttttgtatgcatttgaccacaagtcacaatatcttggaccagcaaggtgagcagctgttacactttgtatgagtttgaactctgcttataatagtatatcatctaagagatcttattagcagaaagtttatgcttagttcaaagtaaagaagaattttagaggatgtctcatggtgtaatgcagtgttgggttcgcaaaaagaacaacacaggtttataatatagtcaatatagaaagatttggtctattatgaagtcgcttgagatgatttcattgttagatctgtttgtttaggaattagctaaatcagtcaatcctaggaga

SEQ ID NO: 471 - DNA, 8050 bp, Homo sapiens
tgatcccagctacttgggagactgaggtgggacgatcgcttgaggctgtactccagcctgggcaacagagcaaaaccccatctccaaaaataaaaataaaatgtgtcttgacaaaaccatgaagtctttacaactgttacccatcctaagggacctcagtagcattgtaggcaattcctatggaactattctggcccaatcctatttgtcccattggtacccagagtacctcctaaaccctcttatagaagtcagagtgctgatcaaaagaatactattctcagtggcaaatggggtgtgtcttgtctatatctatgtgctcttattttccagggatgttggtggtaaatgtaacgtggaggaacaagacatatgtaggtacactccttgactgcacacgacatgattgggcacccccaaggtaagcacttacagctatttagtttatattattctgaaccacactaattggtgatcccttatacttttatcctgctagagttgtacatccagcttttaaaggacatgatggtatagataccagggaaagcactgtatttatctgacattcaagaagactgaatggccaggcgcggtggctcacgcctgtaatcccagcactttgggaggctgaggcaggcggatcacctgaggtcaggagttccagactagcctgaccaacatggagaaaccccgtctctactaaaaataaaaaattagccaggcatggtggtgcatgcctgtaatcccagctgcttgagagggtgaggcaggagaatcgcttgaacccaggaggcagaggttgtggtgagccaagatcacaccattgcactccagcctgggcaacaaaaagcgaaactccatctcaaaaaaaaaaaaaaaaagaagatgaattgtgtattaaagtgttcggggggccgggtacggtggctcacgcctgtaatcctagcactttgggaggccaaggcgggtggatcatgaggtcaggagatcgagaccatcctggctaacacagtgaaaccccatctctactaaaaatacaaaaaaattagccgggcgtggtggcgagcgtttgtagtcccagctactcgggaggctgaggcaggagaatggcatgaacccgggaggcggagcttgcagggagccgagatcgcgccactgcactccagcctgggggacagagcaagactccgtctcaaaaaaaaaaaaaaaaaaaaaaattaattaaaaaaaaataaagtgttcagcgggtgctcacttcagtggtacatatactaaaattggaccaatacagagaagattagcatggcccctgcacaagggtgacatgcagattcgttaagtgttttatatttttaaaattaggaaaaaaaagtgaagtgttgaggggatgcactttgactggaattattaaagtcaccttgagaccaaagctataacatctaaccatgggtgagcaaacattcattgatgatagctatttctcagaaatttgaactcaagaacatttttagttttataaactctactagaacatacgggtttcacaaggaccttttcatgtcgcaatttgacctttagatggatatttcaatcaatggccccttatagctttttcctaatattagtactcagttcgtcagggtttgggaaatccaggcgttgagggtaacttgcaactaacatacaggtaacatcctaggagcttaccaattaatgcaattcccatgcagtcacaagtttctttgttggatcatattcattgaaaatggtagttattatctgaacagttcttttaggaaaagtatcttaaaccttcatctgcccattgttcccatgaaacaaagatgggcagaaatgtcccaaggaaaggtattttaaagttcttgattccataccactttcttattctcagatgtgattattctctaccgagggctatttatgcctcttaattttcagagatgctgggccaggtttctagaggcttagacttttttttttttttttttttttttgagatggagtctcgctctgtcgcccaggctggagtgcagtggcgcagtcttggctcactgcaagctccacctcccgggttcacgccattctcctgcctcagcctcccgagtagctgggactacaggcgcccgccaccacgcccggctaattttttgtatttttagtagagacggggtttcaccgttttagccaggatggtctcgatctcctgacctcgtgatcctcccgcctcggcctcccaaagagctgggattacaggcatgagccaccgcacccagcccaaggcttagacttttataagactatattcaggctgggtgcggtggctaacgcctgtaatcccagcactttgggaggctgaggcgggtggatcacctgaggtcaggagttcgagaccagcctggtcaacatggtgaaaccctgtctctactaaaaatacaaaaattagctgggcatggtggctcatgcctgtaaccccagctactcgggagcctgaggcaggagaaccgcttgaaccagggagttggaggttgcagtgagctgagatcgctccactgcactccagcctgggcgacagagcaacactccatctcaaaaaaaaaaaaagactatattcagaccataatagttgccctgataagaatcagaagcaggccaggtgcagtggctcacgcctgtaatctcagcactttgggaggccgaggcgggtggatcacaaggtcgggagatcgagaccatcctggccaacacggtgaaaccccgtctctactaaaaatacaaaaattagctgggcgtggtggctcatgcctgtaaccccagctactcgggagcctgaggcaggagaaccacttgaactagggagttggaggttacagtgagccgagatcgtgccactgcgctccagcctggcgacagagcaagactccatctcaaaaaaaaaaaaaaaaagaatcagaagcatatgagctaaaacaagttagtaaagttctttatgccctccctttgcatttctgagaaacctattggaaggacttatttctgctttgggcatgcaagaatccagagagataggagctgagtgagtaggttgataacaaggaagcagtaagtagctttacagtagaactgttctgggaacccaaaggagatatttgacaaaatttgcctcttttctgcaatagctatggttcccactgtcttagaaacaacctactccagctgccccctggaacaagagagtcaaaaccatctttagatttacaagggaaccaatcttagctaaaggtttaattctaggcagtgttttaagctccatgaaaagctactttagggcctatgaggagtgacccctaggtgcagatctccagacattcaaagaactcatgtactcttggttatatctgatgtttagggaactcttaaatggataggtgctttgttctacctttctatatcttcatagtgaggtatgtaagaaaaaggcattgggctaaaagtagagctagagtcttgttgtatgttgccattaatcagtgatgttaccttggacaagtcatttagcatgcctggcctcaatttcctgtatgatctctaacatcttttctgaaaccatgactatggctgtatataggaaatgttgacttgactatcttacggaacagattctgcatggttttagaggtaaatgtttgggaataatttgcagctaacgtgtatcccaggagttcaccatttagtgcaattcacaatcagaatttcttttaacaaatcatattcattgaaaatgatagtcaccatctggacagttctggaggctacagctaaactgctttgaagatgttttctcttcttaataatattctgttgtgtttatcctttgccaaggttctgtgactccccgaccagtgacctggaaatgcgcaatggccggggtagaggcaaacgcatgcgtcccaacagtaatacacctgtcaatgagacagccacagcctctgacagcaaagggaccagtaacagcagcaaaacccgggcaggagccaatagcaaaggccgtcggggcagccagaattcttcagagcaccgcccacctgccagcagcacttctgaggatgtcaaggccagcccttcctcagctaataagcggaaaaacaaacccctttcagacatggagctgaattctagctcagaggactccaaagggagcaagcgtgtccgtactaattccatgggctcagccactggcccccttcctgggacaaaggtagaacccactgttctggacagaaactgcccctcccccgtcctaattgactgtccccacccaaactgcaacaagaagtacaagcacatcaatggacttaagtaccaccaagctcatgcccatacagatgatgacagcaagccggaagcggatggggacagtgagtacggagaggaacctattctccatgcagatcttgggagctgcaacggtgcatctgtctcacaaaaaggttccttgtcccctgcccgctcagctacccccaaagttcgacttgtagagccccatagcccttctccttcaagcaaattcagcacaaaaggcctctgtaagaaaaagttgagtggggaaggggacacagaccttggggccttatccaatgatggctctgatgatggaccctcagtgatggatgaaacaagcaatgatgcctttgattctttagaaaggaagtgtatggaaaaagaaaaatgtaaaaaaccctctagtttaaaacctgaaaagattccttccaagagcctaaagtcagcccgtcccattgcccctgccatccccccacagcaaatctacaccttccagacagccaccttcacagcagcgagcccaggctcttcctcaggcttgaccgccacagtggcacaagccatgcccaacagtccccaactcaagcccattcagcccaagcccactgttatgggagaacctttcacagtcaaccctgccttgactccagccaaggacaagaaaaagaaagacaaaaaaaagaaggaatcttcaaaggaacttgaaagtcctctgacccctgggaaggtgtgtcgagcagaggaaggcaaaagcccattcagggaatcttcaggagatgggatgaaaatggaggggctcctaaatggctcatcagacccccaccaaagccgactggctagcatcaaggctgaagccgacaagatctacagtttcacggacaatgcccccagcccttccattggaggcagtagccgccttgaaaacactacccctactcagcccctgactcccttacatgtggtgacccagaatggagctgaagccagctcagtcaaaaccaacagccctgcatactctgacatctctgatgctggggaggatggggagggcaaggtagacagtgtcaaatcaaaggacgccgaacagttggttaaagaaggggctaagaaaactctttttccccctcagcctcagagcaaagactcaccatattaccaaggctttgagagttactattctccaagttatgcacagtccagccctggggctctgaaccccagcagccaggcaggagtggagagccaggccctgaagacaaaaagggatgaggaacctgagagcatagaagggaaagtgaagaacgatatctgtgaagaaaagaagcccgagctgagcagttccagtcagcagccctcggtcatccagcagcgtcccaatatgtacatgcagtccctgtactacaaccagtatgcctatgtacccccctatggctacagcgaccagagttaccacacccaccttctgagcactaacacggcttaccggcagcagtacgaagaacagcagaaacgccagagcttagagcagcagcagcggggagtggacaagaaggcagagatgggcctgaaggagcgggaggcagcactcaaggaagagtggaagcaaaagccgtcaattccaccaactctcaccaaggcccccagcctgacagacctggtgaaatcaggacctggcaaggccaaggagccaggggctgacccagccaaatcagtcatcattcccaagttagatgactcttcaaaactcccgggccaggcccctgaaggccttaaagtgaagctgagtgatgccagccacctaagcaaggaggcctctgaggccaagacaggtgctgagtgtggtcgacaggcagagatggatccaatactctggtaccgacaggtaactgttgccctgggaggaagtggaaataccgtatggtaatcgtctatcttcctcacaaataagggctgtccttatacaggggttcaacggaattgagattagcaggagagatgtataattttaaggattctttacctttgtaaactattttaatgttttttattttattttagtattattattttttttgagatggagtctcactctgttgcccaggctagagtgcagtggtgcaatcttggctcactacaacctccgcctcccaggttcaagcaattctcctgcctcagcctcccgagtagctgagattacaggcacacgccaccatgcccagctaattttttttgtatttttagtagagatggggcttcaccatcttggtcaggctggtctggaactcctgacctcaagtaatccacctgcctcagcctcccagagtgctgggattacaggcatgagccactgcacccagccaatttttattttattttatttatttatttatttattttgagatggagtctggcactgtcacccaggctggaatgcactggcgcaatctcagctcactgcaacctctgcctcccaggttcacacgattctcctgcctcagcctcccgagtagctgggattacaggtgcacgccaccacacctggctaattttttgtatttttagtagagacggggtttcaccatgttagccaggatggtcttgatctcctgaccttgtgatccacccacctcggcctcccaaagtacctggattaaggcgtgagccactgcgcccagtcgtaattttttttatttttatgtttttatagagaccagagtccctctgtgttgcccaggctggaatgcaatgatgcagtcatagctcactgcaatttccaactcctaggctcaagcagtcctcctgcctcagcctcccaattaaccaggactacagatgcatgccaccacacccagatgatgttttaattttttgtagagaggggtctcactatgttgcccaggctggtcttgaactcctggcctcaagcaatcctcgcgcctcagcctcccaaagcacagggattcatattaatgttttttaaaaagcacttttatatccatagcaggtgttttttccatttgacaggaaaggcccagacaagttagcttaatttgtctggggttacttgagacctcactagcagagccaggattagaacccaggtatctcgattccttgtccgtgtttcctccactgtttggttcctatgaaatgagttattgatggtctctctattttttagagtaggtccaaagtatactcagttactgagtttctttaacaaggattttataggttgagttagaactaggaacttggaatctcatatcttgctctgctcatgagacttagaatgtcttcccttccctcttggtataatagttatgcttccctccctcctctgatctgagtgtcacttataagctttccagtccctgagcgtgctctgaaaaagtgaaacaatctaaacatattggaaggggcagcctctcctatttcagtcgttttcccagaatgcttgttcttacctagaaaacatccactgatgcatggatggattttccttttctccccctgccccatcttgttccctgtgggtgggtgcagaggtgggggcgggggctttttaaccaaaagggagcagagttggattataaacaagatcagtagaggccaaaatcctactctgccccaggtgtctagtactaattatctgctctggtggttctactgggaccttgggcttgaa

SEQ ID NO: 472 - DNA, 8050 bp, Homo sapiens
cattcatgttgtatacatgacatcatgcatttgtcacaacccacagaactgtacaacagagagtgtgagccctaatgtaaattatggactttagttaattaaaaaaagaggtcccccatccctgacccgctcagagaaattgatctgaggcctcagggatattatcctctaaaatgcctgagttgtagtaaaaaaggaaggtggcgagatgacccatgcaggccgtgtgtgcggtgggacctctccccgtctccaccagacctcctcaggactctggtgcacacctgtccctgggatccacctgctgccctgcccagccagctgctgacaaggcccagcttgtcgggagaacatcccaggccaactgtgagcttccgacggtgaaagggcttagggactagcacctgttttgcagctgcctggagctttcctggaaccagactggtggggaggctgtcaattcctacaaagtcaggagactccttgatctgcttggtggctctttttcctgtttatttcattttatttcttttttattgttttagagatgggggtctcgctatgttgcccaggctggtcttgaacccctggcctcaagtgatctttctgcctcagcctcccaaagtcctgggattacaggactgggattacatcctgcctggcctctgtggtggctttttttgtttttttgaggcggagtctcactgtgtcgcccaggtgcattgcagtggggcaatcttggctcactgcaacctccgtctcccaggttcaagcaattctcctgcctcagcctcccaagtagctgggattatagatgcctgccaccacacctgtatttttagtagagacggggttctgccatgttggttaggctggtcttgaactcctggcctcaagtgatatgcctccctcagcctcccaaagtgctgggattacaggttgaaccaccattcctggccgtctcagtcttttcatggccttctgccctgtttccatgtctgtcacctttctcttacaaggacatcaggcattggatttagggcctacctgaaatccaggatgatgtccttctaagatcctgaacttaattacctctgcaaagaacctatttccaaatagggtcacattcacgggtaccaaggggtaggaccaagacagctttttgggggaggagagggacaatttggcccaggacatgttgccttgttgtcacccccttccagaagatcaccccccacgtttcccatgatgctttctacagtggccctgacctcctgttcagggacttgattcccttggtgccacggtgcaccccacatgaccctgttgttgcatatcgtggagagaaagcaccccagcttgaagctggacaccctgccctgtgtatgtgacttaagcctcagtgtctctgtgaggaccttctcttgttccttggagttgatggagatgtctgcttcttgagggacagttttccccaggtcagggggtcctcacgcagtggtgggtggccgtgcctgggtgcagtttgccccactttcctcactgtcctggtctacgccctttactcatttttcaaggatggaaaagcgaagcctctgagttgtacatgggtgagtggtggcatctgggaccctccccatgcccacaggaagaagatggtgagaaatagctatccaggctcatggtcacaggaagtctggtccttcttccggggtttgggcagctccaggtgactggacagccctcacggctctcctggggtgcggccccatctcgccaccgctcctgactgtttcctcctttccaggatgtggaggtcagccccaaggtggaatccgtgttgtccctcttgaatgccccagggccaaacctgaagctggtgcggcccaaagccctgctggacaactgcttccgggtcatggagctgctgtactgctcctgctgtaaggagctctcaggggatggcgcctgggggtgggaggccaggcatctgggcccacccaggccagctggcagagctggcgtcctcccgggcatatcctctgctccccggggctacaagccatttctggaagccaggatgggccctgggtagagtgggggacaagcacatgcggcttggcttagtggggagggtggtcttgaacactgctgcagtctttttttttttcccctatctcttgcaggtaaacaaagctccgtcctaaactggcaggactgtgaggtgccaagtcctcagtcttgcagcccagagccctcattgcagtatgcggccacccagctgtaccctccgcccccgtggtcccccagctccccgcctcactccacgggctcggtgaggccggtcagggcacagggcgagggcctcttgccctgagcaccctggatggtgactgcggataggggcagccagaccagctcccacaggagttcaactgggtctgagacttcaaggggtggtggtgggagccccccttgggagaggacccctgggaagggtgtttttcctttgagggggattctgtgccacagcagggctcagcttcctgccttccatagctgtcatggcctcacctggagcggaggggacctggggacctgaaggtggatggggacacagctcctggcttctcctggtgctgccctcactgtccccccgcctaaagggggtactgagcctcctgtggcccgcagcagtgagggcacagctgtgggttgcaggggagacagccagcacggcgtggccattctatgaccccccagcctggcagactggggagctgggggcagagggcggtgccaagtgccacatcttgccatagtggatgctcttccagtttcttttttctattaaacaccccacttcctttggtttgctttgctttgcatcttcaggggtgaacctggcggggatgggaggtggccaagtgcaggaagtggaggggggcagggctgaggatgcggatttggagtggatggagcctgcccaagggatgtggaatgagagggatgccagggatggagttccggcccagcccagcccagcccagcccagcccagcccagcccagcccagcccaggggcctctgcaagcctgggttgggggaggcggtgttgggctgataccttggctttgacccttgccatcctccctccctccctccctctctccctccctccctctctccctccctccctccatctggctgcccccaggcagcccctagcagggacacatatgggacatttcagagacccaggtctggccctggcacctacattgagatctgagatcctctgggaacccccagcctgtccccctgcagctgggatctggggtgggaaaggtgaggtgtggggatggggtaggaagcagccaggcagaggcaggggtgttaattacagtacacctttattaatactggaatcttcacagtgcatctgttacttgtagcagtgactatatttaaatcggggaggatggtgtggagggggcggggaggagaggagaatttttccaaaatctgacggaaagaaaagaaacaaatggttcagatgggacggagggtgggggagggggggagggtgagtaggaaccaggagggctgcctggggtgggggaataaattaaaaaaaggaacgagttaacaacagcaccaggaaagttacttcagtcaaaagacgcttttgaaaagaatatttctccgtacaaaatgagaaattaaacgaacgtaaagtcccccaaaccaaagtttgtgatgtgggatggttggctcggatcccgaggtgggtgggcctatgaggtggttgctaagtcgacgcaagggcggcgggggtggtctcagggatggacaaggggatggagtagagtatgtacagcccccggggctcacaggggagggggacggcggagtcggtgggggctgtgccacacgagcccccctctctgggtagcccctgcctcctttcccatcaggacctctgacgcccaggtctgcccacccactgcccctcactctattcccaccacatcctgaatcctgctccaccgccctgcctcggaagacccctgcagccctggggagaatgtgtggcggaaattctacccaagactccccaaataattggtcacctgctctcctggcccctaaaaccggggctctggtgttggcctgagctccacgggctgagtgctcggccaggcagttgttgaacctagtgacttacttacagggaccattcttcatcagctccctctgatgggactctgtccacatcagggcctgcttggtgcccggacctacccaggagctgcccagctcaccgcacaagaactcccaggagctcaagcctgggaggctcagacccagctccattctatcaatcaatcaatcaatcatcaagaccaaggtgctcctgacccccaggtaggaccctgccctggggccacgatgccctctgagccctgctttccctcctgacctgcggggccaccaggactccctccgctcgccctaggctcacgtgcttttacctgctgagacttggcgtgacttggtgcgtggggtgggggcagccttgcccctccccttgcccccgctgccaccacgagcctggactacagtgggggccgtgctgggatggcatctcctccggcaacagagagtcaaagccaatcttcccagactcgctcccccacctgggcttgcagccagctcagaccacagcagacaggccgggagcctcccaaccttattttggctacgctcgagacactggagagaacagtagcttccaccgggctctgggggagccaagtccctcccttctcatcctgccataggaccaccggggggtccctgtcccccaggcactcccagacacacaccctgtatcgtcccctctcccccacacttagtcctcgtccacagtcagctccattttattatattcataaaatgaccccacacctcctactgctccagtcaccccccgaaaggtggctaaaactgtgacccccaaagttaaaagattgatgtacccaatgagaagtggacatctgaaaacggtgcctgtgtggctggccggtgaccccagggcctccggcctcctaaccctgctgccctagtttccaaagagctgctctggccccctccagccagcctcacggggtgggggaggcgaggggtgggagccaccacagggcccccaagacccccccccccaagcagcccctggtttcctccctgagacttggcgtgggccctggaactcccttcccacacggggggcctggccgcccaactccaacctgccgccctggcccccagcccccagcagacatccagcccagcgtgcacctggcccctccacagccgccccgcctcctggagggagaggggcctgggagaggcagagagaaggcaagaggggaggagggggctcaggcaggggagaggggggccagcattccaggaggagctgaggcaggaccagccctgggagaggccgggatggtgaaagggaggccagcctggcccctctgtcatgggcagcggccctggctctggtgcttatgggtagggaagaggcagggccccagaggaggaagaggagggaccgaagagcataaaacagaccccgaaccaggcccaggcctgcaggctccgtcctggccaggcttgctaagaagtcacttcctgtttaaatgctggaatccaagtgaggtgtctttccataaagtggcatggcctctgccctggctctgtcctctctcctggctgggcctttgctctgagtgcctgcggctcacagaccaggccacctgctcgcactggggcctgagaggatggggagggtggcgccatcataagatgcggggcgccgacctgtcgttggtgacggtcctgcggagccggaccccacgccggatggccaccagcatgtcttcggccggggggtcgctggtggcggctgggggtggggtgggcgtctcctccgtgggggtggccgacagagcagtggggaaggggaactggccctcacccagtgcgtgggcacccgccaccagctcccccagcttctccaccaggctgtgccggttggccgccagctgctgctgctcgtcctcggcccctgccccggggtacccggctgcctctggggatgggctgccccaggctgtgttgggcaggctgagcctctttggggaggccttggcgaggtccggtgccaggggtgaggcggtctcgtcggtatagaagacgcactcctcactgcccgcccgtgtgggccccatgtagccgggggagtcaggcaccgtgggcgtcttcacagggacgatgggcggccggatggggatggggccagcgctggacagggcgcggcgcacggtgggcttggtggagggtgtgcggcggatggtggccacgccggggggtgcgcccgagggcaggccagtggccgtgggcagccccgcggtgggcagcccagcagtggaggctgggcgcttggtctggatcaggcggcggtagttctgggcgatgttgctgttgcgcgggatggtggatgacttgtcaaactcgggcgggccctcgctgtccgcatccccattcacggagtagcagtcgtagtcggagcctgggggcacgggacacagtgaggcccagggcccaggtggccccttgcccccagcccaccagggtgagcacagagggggaaggacggggccctcctggatggctaagtcccagctgtccctggtcccaccccagccccgcgggcctgccttgggaggggatggtgtcctcagagcaggagggcgtggtggtctgcgtgctgtagccgctggagtactgcagcgagtcccggctgctcttctggtgctccaggctcaggccccgcgtcagcaccatggccaggtcactggcggcgggggacacctcctcaccgtgctgagggtgggaaagtgcaggctgaagccttgcgcccccaatcccctctgcccaaattccaggcagccctgccaggtggttggagccggccctgaggccactggctgggcctcctgggactgacctgggcgtgaaggggggccctggccagcctaccttggctgcgatggtggcaggggacatccggggtcgcggtgcctcttccccgctggggcccagggtgcccccactggcagggcctggctctgtgtctcgcaggagctccactcggtccttcctccgctgcagagtggcgcctgagggctgctcatgggagccgaccttggaccagtcctgcagggagggtgtggcaggtcagggggaccactggccctaccacctatggcccgggggcccgtcactgtggctgaggctcagggtgtccagggctatcagggggtctctggttcgcaatcacagccaagggcagagcatggagtgtgactgtggcccctcagtcccaccaggcccaggggtaagatgtggctgtgtgggcagtgactgtaggaaatggccaggtggcttgtctcttggggacaggtgctgtgtgcacgcacccctggctgaacccaggccctttgtgcagtaatggcaccaggtggggagggcatggatgggaggggcagctggtgactgtcctggggccgggctgggagcactgaccgaggtgggggagctgcactcgctaacggactggcaggtttccgaggcctcggaagatgcagagctggaggacttctgccatgcagaggccagcaggcggttgcagacagaggggccggcaggcagcaaggaggagaggagagaacagttttggtcacagagctggcatgcaggggggcggttcaattcagcgccttgcccagcacccaccccccctaccccagggccacggccgctgagtgtctgcagcagcacacagcagcccagagtgcacacggtgaacgctgacccacctgacagcccagccctgcgcattttgaagactgaccacaggactcactgctgacggcctggatatggccaccgaggggaaaaagagatactaagggcggcag

SEQ ID NO: 473 - DNA, 8050 bp, Homo sapiens
tccctgccctctttgtaagttaacggaggccgggcgcggtggctcacgcctgtaatctcagcactttgggaggccgaggagggcagatcacctgaggtcaggcattcgagaccagcctggccaacatggtgaaaccctgtctccactaaaactacaaaaattagccaggcgtgatggtgggcacctgtaatcccagctactcgggaggccggggcagcagaatcacttgaacctgggaggcagaggttgcagtcagctgagatcacaccactgcactccagcctgggcaagaagagcgaaactccatttcaagaaaaaaattaaaattaaattaaaaaataagttaatggacacactgctaaaattgtatcattataaaatgtttgttactggttcctgataactagtcttcaccatcttaaggaaaatttctgtgttcctagtttactaaaagctttcatccaaaagagatggtgaatttcaccaaatgcctttttcacgtctatttaagataatcacatcgttttctcctctcgctctgtcacccagtctggtgggcagtggcgcaatcattggcttactgcagcttccaactcctcggctcaagcgatcctccagcctcagcctcccaagtagcaaggagtataggcacgtgctaatttttttaatttttttagagacaggatctcgctttgttgcctaggctggtctcaaatccctagctggtctcaaatcctcccactttggcctcccaagtgctgggattacaagcatgagccaccacacttagcctcccgtaacgttttaatatatgaatcatattaagagatttcctaatattgagccatctttagttttctgaaacaaaccctatgttattcccttaacatgctgccatgtttgctttgctactatattattgtaaactcttgtatctctattcagaagcaaaacgggtctatactctccttattttacactatccttgtgaccattcgaactggccttataaaatgaaatgtgaaatcttttatcttttcctgtactctggaagagcagaagaattatctattccttgagaatttcacaaaattagccataaaaccaaccaggctttgtgccttccaggagagagatcgttgacgatcttttctagttcttttatggtaattgattttccatctcttctccaacaacagcaaggatcagaggttgtggctatttcatagggaatatctgaagagggacagctacagggatgtcgtgggactgcatgtcatgggttaaacgggatgggtcatggggaactttggtgtttgaagggctctcacaggttgtgatgtctgggggagcatagctgtcactcaggtaggcattgctgggcttggccacctttaggtagacaacatcatacgtgttcttcagggctgccacagcatcttcatgcatgacgtcctctagccccacactgttgacctggagtcaaggaaagcaaagctcagacaaagccacaaatggcccaagacagaagcactggggtgaagtgatgaacttgggcctgccagggctagtaggtgagacccaaatctgggctagaaaatgggctagatggagtcctcaccgccaggatcttgtctccaatctgcaacctcccatccttgtgggcagcacccccttcgatgatctttgttacatagatgctattatctcctgggatgtgctggttccctacgccccctgcgatgctgaagccaagacctggatggaggggaggccagaggtgggtgcccaggaagcaggcttgggggcacaggacagttgggatgggggtgggaacaaaatgagttactacctttaggccccttgatgagcttgatctccatgaccttctcagccgggggcttccggcgcatgacatagaggcgaacgatggagcctgcctctttgagggcttccaccgccgctgagtgggtcacctcgcgcacgtccacttcatttacaaacaggatgctgtcgttgaccctgggagcagcaaggtgggcctgagccaagagcttcctgctgccctggccctccctctccagggaccaagcaacctaacccctgtctcctctccccacctgaggcggccatcctgggccgcagccccaccaggaatgatcttggtgatgaaaatggatgggtcgtcaccgatgtgtgggttgtcagtgccacctgcgatgctgaagcccagacctgagttaccctgggtgaaggaggggaagagggtcagctcccctcactgcccaagtctggcaaggcaagtggggtgggaaatggcttggagcagccagaggaggaaggcacagggtgaggggctagccacccagaccacatggcagaaagaaaggtacagacgggaggccacggggactgccgatggaggagcctgctcaccctttccaatgtgatttcctcgtattccatctccccctcggtcccgttcacctgcaactccagcacgggacagaaacacaaaagcagtgagacagacattcctgtctgaccacctgcccgtcatctgctgccctcccttactccctccttccttctgcaatggccccagccccaaaatctaaacaactcacatatcctggggcttctagggtatctgtgttgacaatcactgggggagaattggcctgtttgggaaaacaagagacaaaaagcagcctgagccttgactcgagagggagcccataacggagggtcccatcagcgtggctaccctttcagcctcttagccaagcccactccgccaccctgagagctgctcaagggcccagcctcaatccacatcacacacacgcacacgcgtgcacatgcgcacgcgcacacacacgcacagatgcacacgcgcaaggatctaactctgcccagcccggggccccctgcatgtggaaggaggtgtaggagaagcgggaagggagacagccagacggagaggggagcagcagatggcaaagagtggggagaggggggtaggcttgggggaagggagcttctcaccggatgtaacaccacagggtgttacatgccttatgtgctacacatggacaccccagggatcatgtccaccgggtcctggtccccatttcctgccccatccccccaaccccccatatctacccagatattttcataaccctcccctagacttgcccctcactttcacagacatttgccctaaaccctgcaccccgggaatccggggttccccagctgcaggcccctccctcggtctcaccaaccagccgtccaatccaccccttcctctaaggaccgtgttgcctagcaacggtatctaggaccagtcaagacccggggagacccacctccaggaggccctgtcgtcaggacaacaggggggtggggcgtggcctggggccgaccaaactcctgagcgcagaagggatccgctagccccgcctctcctgccctgggccccgccccacgttagccaggccgagaggaggccgggctgaagaggtttgtgggcgcagcgcatcctgaataacctgccttcctcgctcccctacgcccctcaccctacgcagtgcaaaggacgtcaggaactgggagtggtgaaagacatccgggtcctatcccgctcatctactccctccccccacttcattcgggaaagggttaaagtggggcgtgcccaggtccctgacgtcaatcgcctggtctctagactcccaggcggggcccgctttagcccggtcctaggggcttccccaattgccagggcaaccgaagccacgtctctatggcaatggggggaggccgccaagagcctccttccggggtccccaacctacttcctccttaaagaaacatgtatttgcagtcgcccaagcgcaaggattccccagtctccttcccgctctccccgtccaaaggggtccctcccctctcctactgctatttctcaagcctacaaactaccgaccattttcaagctgtatcacagatttcacacccataaatctattaacaccaccctccaacccttcacatatcagcaaatgctgttgtccaaccaacagtcactgactgccaaaatctcatccacgtgttcatcccccatcccacagcccgtcccccatcccacagcccgtcccccatcccgcagcccgtcccccatcccgcagcccgtcccccatcccgcagcccgtcccccatcccgcagcccgtcctccatcccatagcccgtcctccatcccatagcccatcctcaatccccatccccatccctatcctggaacctccttcccagcacacccaccttcatccactacgacattcatttgcttcccatccctatctctgcccgcatcccacatgctccatctccatccctgtctcgcccttcaacatccatcttccaaccccagcctccattctccatccgcttccctggccctgtcgcaccctccagccccatcccttaccaatgtggcctcatcctccatcccaatttctttttttccagagacaaggtctcgctgtgtcacccaggctggagtgcagtggtgtgatcatagctcactgcggccttgaactcctgggctcaagcagtcctcccacctcagcctcctgagtagctacaggcacatgccaccccacccagctactccatctcaatttctgattccccagagagtttatcaccattctcccttaccctaccttcataccctcaagattattctcaagtaacaatcttacacttctcaatcaactcccctctcttctgaaaattggggcttctcctgttccccaggtgaggccttgtcctgagacctccaccccatgcttatggcctccaacactctctccctccacccccttctgctcctgagctctgatcagcagcagctctgtactaactaccacccctcaggctccctacctcctcttccccctgctcagggatttaatggccctgccttgcacaaagcatctctagtcttctttccctcactcctagcatccacagaattcgcacaaacactctgtaccatccctgtctccagggccttcctttccttgctctgtcagcctcattcactgccctgatctcacagtcttatccctatctggcccctgacccaggacctcttacccttcctatcccccaactcctctcttgccagttctaactccagaacctgcttgcccgctccctaggctcagagacctcctccccatcttcttggtgaaatgtcagcaacctcccccttcccagagcatcccacaacatcctagaatccccaccctgaccccacagtgtcccctcaatctcacagcttgcctggtgctctccagtcctccccatcctgtgtccccagaagaggagatggaggaaggggaagatggaaagtggactggagaatggaaggtcccagaaaccaggcctcccgggactggagagaggaggacgctgtgagcagagaggagaaagggaaacaggtggtgggggatgatggagggggcagagggggatagaaagaagatatggcagaggtgagaacccaagaggatgagagaggggaggaggaaaagagggaaggtgaagatgaataggcaagagggaacatgggaaaggggagctggctgatggagggagaggactgatgagggaaaggactgatcaggccccagcggcctgggctggggatcagggagagggagaggagaatgcgtgggaggaagagagagacagcatcaagagccagccagccagccagccagcagggaggaaaggctgcagagggggaagagaactcaggagtggagcaaagctggggcaggggacgaggcagcaaggccccaccatgtgaagtctcaggccagacagatggaaagagctggagacttggggacagggcgagccaggcccagaggcggaggtagggggaggaggcggggaagggacaagagcaaatgagggcagcaggcgcttggaacagagctctggacacagaaaatggaaatggaggttgggggtgtgaaggaatgaagaggtcccaggcgtgggggcctcttgggggatgcacacacctcaacacacacgcatacagcacacgcacaggcacacaaacggcgcacgcacgcacacacacacacagcacacacacaggcacgcatgcatgcacacacgcacaggcacacacacagcacacgcgcacaggcacgcgcgcacacacacattcttgctttaggctttacatccactcccattggcctggcctgtttctcctctgtgggaccaaggtgtttccagccccacaaacgccccctcccccagaccccaggagcccaagccccaaacccccgcccccagtcccagcatccccctccccacggctctctctcaccctaccggcccttagggattgctgcagctccgaggctccgagggccgcactggggagggggccaccagggtctcctaccttgaagggggagaggtgggcgtggcccacgaccccgtggccagcctcgaggtgggacaagttcctctccgccacgtgcaccagctcgggggcgtttacctggttggggaggtgggccgggctgtgctccagagggggcgtgtcttcatcttggtagcggtatttctggggatggggacggaggtgtcactggggccagcccggtgcctcaggctccaggctggccgccctggccgccgcctcttcccccagccagtgcagtgcggaaggccctggggcctgaccagctcctccccctccctctcctctagcccattggctcccctctctccactctcccaacagccccctctcccgccagggcctcagcacctctcatcaatccccaggtcccaatcccatcccccaactcctactcctcacatcctgggacactggccttctggtgggcatagcccctctggcatctgtgtcttcacccctttccccaccaccttcatcttcgagtccctccagcttctcagagctctagccccgacactcacatctccattctctgcctccagtccccaacttccttgcttctctcaccatctcagactcactcttgttctagcctcccctcccctacccctctggctgctcctactctgcatggcatcctccccgcgccccacctccatggcctcagtctccccattgcagcctctaccccacaggtgattggctctcctttaccttgcactccttaggcaaggactgaagtcaccccttccaccagaaggtacttggtatcagcccccgagacaggacaaggctaagcctgtccagttcactgcccttgctggtttccaagcagtcaacagaggggccccgggagtctggccctacccctgcaacagcccacagcccagccagctaatccggttatgctataagggcatgggctgggggaggaaggggaagaacagagacagcagggctcaggacaggggcaagaatgggtgccagcctccctggttggggaggagggtagcatgctgagcctcagagtgaatttctggtctccctctgctcttttggggtgaaaggcccaacatgacccctgactccctgcccagttaatcagctgccatcccaagggcctcctgtgctagcttaatagggacaacagtaaaatgagattaactgggggccagagaaggaggaaaagggcagatggagacagcagaagaagacagcgtttctgcctgggtccttccgtgtccgcctctgccctcgcctgctcctctcctctggaacgggcctccacagagactgaccctccaagctccaggttcaggaaggggaaggtatcatacgcagggatccctcaggaactgaagaagacagaatgcaccgcccagtacacatgggtaaaaagagaaggcacggcaatcccagcactttgggaggctgaggcaggcagacagcttgagcccaggagctggagttggagaccagcctgggcaacacagtgaaaccctgtctacaaaaaatacaaaaat

SEQ ID NO: 474 - DNA, 8050 bp, Homo sapiens
cgtgtacatatgtacctctgcaggtatgtgtcatggctggcgtgtgtcctggcctgtgtccgtcggcactggtacatttgaaggtatgaatgtttgtatgcctgtgaatgtatctgtgtctctgtttctcttggcctgtgagcttgtgtgggcgtgtttgtttatgtatgaatggatatacatgcttgtgcgtgtcttggtctctgtgtgtgtgttgagaacaaacctctccccatttgctcaagctggaacccaggatgtcatcctggccacctccccaccccccaactcccatgcaatccatcccctagtcctgcccactatgcctactaaaggcctctggaacctggcccttctccccacctccactgcctcctccctggtccaggcggtagcatcattacctgggtgactatgacagatctttatatatttctgattttgttctctttgatttgttgtccacatagcagccacaggatctttttagcacacaaatctgttcacacacttccaacccttcaacaccccctcccttgctttcaggataaagcccccaatcctgcacatggcctcccaagccaggtaccatcctcctctctctctctctttttgagacaaagtctcattgttgcccaggctggagtagagtggtgcgatcacagctcactgcagcctcaacctcctgggctcaattgatcctcccacctcagcctcccaagtagctgggactacaggtacaccccaccatgcccggctaatgtttgtgtttttggtagagacggggtctcgctatgttgcccacgctggcctcaaactcctggactcaaggggtcctcccaccttggcctcccaaagtgccaggattacaggtgtgagccgctgtacccagctaccatcctcctctcttaaactgcctgccctgtttcctcttcctcttcctcctggccctggctgagctccctctgcactgtaactcagtgtttcctcaagcctcgggtctttctccatactgtcctctctgttcccctgcctgccccctgcacagcacttaacgcctgtccatcttgggtccaatattgcctccttgggaagcctctcaattctatcttcccagggtgtttttctctgttgtatttatcacagtttacaatcatagtcttatctgagtaatatctgtgtccccagctcaactgtgaatctgtcagcccaggcctggcacagctcagtgttcagtgaatgtctgctgaatgaatctgtgtgactggaacctcttgggcccagaatcaagtttgggcccacagcagttgtgcgtccacaaactccctgccccgaggaggctgaggcagccatctctttgccctcactggccaagtaaggaagcccaggcggccttggtccctcagagccccagtgtcgtcatctgggaaatggggtgatcctaaggacactagcctcatccagttactggcaagatgaaactgatgacgaggattgctccagccagcccagatgcccttgaggcaggagtgaggtctgattaatttatctaaagcctggcacgagggcggggcttcaggaaatgacaggcaaatcttggagtttgcaggaatgagcctttgtgaatggctcgttttgcagggagccctgcccaactggattctgactcctcatgacaaccctaagggaagcgtgattattatgatctctgttacagttcacacattccttcacttattaatccaataaatatttgagtgcctatttgcctggcataccaggctctagaaatacagggtaaacaaggcagatacagccctgcttttaggatgttcaccgtccggtggggactaacagtaacaataaccttcacttctcctgagggtttgctgcgtgcctgtgccaaacgctctacattcattctaacctcacaaaaggaggtactcctatcatcatacccattttagagctcagaaagctgaggcagggaaagagggagtctcctgcccagaacatcacagctcccagcctgaggaaccggatctccgacgcccacgtttcttaactacagtctgtactgcctctgggtatgctatactggtgtgaggctcagtgtcttgctgtgacagcgagtgcccttgggctccagtccgtctgccctctgagcctgtctgagcctgcgtgtgtctgaagccaactccaggtctattctgggctaatgatgtgttctacggcaggggaagcaatgagtttggggtccctggggctgaggggtggtgttagtttccttcctgcatgggaacctcccacgggtccccatgctgattgataaatgcttgtaactgaggacctgcccctgcctgaggcttgcagcatttctgttggtctgtcagcctttgttccgccttttgagacctgaaaataatgtgacaccctagagaaatgaggccttcccttttgctgaggcaggtgtggaggtctgaagccaagccagggcccgttgtcctggaaagggtaggggtcagggctaggccccagtggagccggctgaagcgggttgactgacaatgaatggatggatggatggactgacttgccgggtgggaggccgggactgcgatgaactttactggccccgctgcactctccactatgggcaccccttcctcctacctctccttgactcaccgctagacttcctctttgagtaacacctgctaacctccttcccccttatcctctcaagagcgctggagccctgaacatcggcgcttgaagcattccccaggtgggaaacactgagggcatccgttgcccttggtcacacagcgaatacggaatccgagcgggaaccctggtccacgaagctcgcattccggactctgctcccaagccgatccgggcgtcagctagtccctgtgccagggtgggcctctcggctgtcacatcacccccttctcacaatggatcatcccgttgtccccgcaagcggcaatgggccagtccgcggacccccccaactccctgtggcagtgggccagtccacgctgtccccactgccccgtaggatgtacgaggttccttccgggctgctgccggtctccgcgcgctcacctttggccttgtcttttcgccaccgccggcgaccgtggctccttgagccctctttggcattcttcgaggccggggccatagcggcctcggcgggctccgttcccccggccaactccatcaattccccgcggtcctcccgcgggggccaattccagccgcgaggccctgcccggagggccaatcctcgctacacactactgtcgggcccccctattacccaatcccgagcttgctcttctctgggtccagctccctaaccaattctggtctccctccgctgccgtgctccgcccccaaccgccagaatttaagatctggctccgccccctaccgcgcattaaagggctcgcggccaacaaaaaggcaaccccgggggtggcgaaaagcgtccttcgggcaggactagtgcggagccccgcggggagcaccccagcagggaagtcccgatcttcccacgtgctgggaagcctcccatgtgctggctcagtctcgccatcccactcaccttcccagggagggatgccctagcacgcggcccggcccgccttttgaagggggaaagtggggcgcctctgagcctctgcctggggtgggggcgggccaggtcctctgccaactcaaagacgaggcggggcgccagcgctggaggcgtggctgtgcctgagagccgttggaggagggagccccgctttccctctcctgtctcctagttctcctattgcgcttttcctgggggatctttctccctctgtctccgccccctaatccatgctcccgataatgagggtgggggatggtggtaggagaacgctcggcgcctgcgcactagcttcaggccgcgggccggcccaagagcggaggtagagggaacgacgcatgcttgagaaatggcgggaaacagaggaggctcgaggcttgctcacacgcacacagccaactgcttctggaccgccttgctcacacgcacacagccaactgcttctggaccgcctgaaaggcaacctcgcccgccgcggtggtgtggggcgggcatcccttgagactgtgctctggaggcctggagaaacagctttctatcctcagcactggggagagcaggcctcaatccctgcctttgcctgccgcccctcttccttccctctcaaagcatacccagcagccccggcgctgagaaacgcgttactctcttatcagctgtgggagagacaagacagactggcctctgggcggaggggccgccattgcctgccctctggaccagggcctcacagataccctcagcttcaggattagggctgcgttggtttttccccccacatcaggggacttcaacaagtaacctccagttccatagataaaacttgtattccccccttctccatggcaggggttttgagcctagagaaggaagatcggagcttcctggggctcctgtgaagcaggcagggggcagcactgggccccgggaagaggcggagaaggcgagggagtgcctgcggtgagcccagagccttgggcccgttatcctctgatgctgctcccccaactttcctgccgtcagtccctgaccttgcctgagaccttggcggctcccgcacctctctcccggctcctccttgctgagaacacaacccgcaaggcccttccgcctggctggactgagtcccctatggaggcagcctggcagggagcaggtatcttcctggcagaagaggacagacctggtaaactgagagactgttgatgccccaatgttctgcctagcctgcctggaaactccagaagggtaaggtaccgtctttgtattgtattgctgggacttacgcccgtgtctaccccagagctggtgctcagtcagtttctgtggatggatgaatgaacactggcaagagggccgctttcctggtctcctggtccctagctcagagtgccttcccactctgggatttgattttccccaaatcctctatagggaggcagcctggtccaggggagaaagaccccggcttcaaatcctgactttgccacttcctaactgcatggccctgtgcaagaacccttacttctttattttctacctgatgtcctcatttctaaaatgaggatgttggccaggtgctcggtggctcatgcctgtaatctcagcactttgggaagctgaggtgggaggcttgcttggggccaggagttcgagaccagcctgggcaacatagcgaggccacgtctctacggaaaatgtaaaaattagcggggcatggtggtgcacttgtagtcccacctactccggaggctgaggtatgaggatcgcttgagcccaggagtttgaggctgcagtgagccatgatcataccagtgcaccccagcctgggcgacagagtgagactttgtttttttctttttttgagatggagtcttactctgtcacccaggctggagtgcagtggcacgatctcagctcattgcaacctttgcctcccgggttcaagtgtttctctgcctcagcctcccgagtagctgggattacaggcacctgccaccacgcctggctaatttttgtatttttagtagagacggtgtttcaccatcttggctaggctggtcttgaactcctggcctcaagcaatccatctgcctcggcctcccaaagtgctgggattacaggtgtgagccactgcgcccagccttttttttttttttttttttttttaataatggggatgttgatctttatctcaggattgttgaaggatgaccagagctaacctgatacaccgtaagtttttagtattttttaagtaaatgaatgactgtccctgagaggcttcaattcctccagattcacactcacctgtatcctggtagtgtctgtgattccgagcactggttttctcatgtggcgacgtcccactgtatcctgacatcactttataaccagattttcctttgaagcctagcttcactccctgggccaccattccacccatcgtggctggagaatctgtgtctgaagatgatcccacatctgattctgactcagaatctgtgacccactcagaaagtgccttccactctagggctgatcgctgtatggatagttcctgaagttttgttagaaatcccagctctgtcaaagatccctgcttggatttggctccctggactggcgttgtttgcttgtctgactgttcaggtgtctcttgggacgtagattcagtcggggcagatggctcccttttggctccaggtttagcctgggccgcaggtgttgattcagcttcttgttgagctggaggtggctctcctggcccaggccctggctgggctacatgtctttgtctcaatgctggctcctgttgagttatagattcttttcctagcccaggtccctgctgggaggcagcttcctgttgagtgagcagcaccctttggatgtaaggtgattgctgtggtgcgggcttctgtggggcaagaaattcctcttgtgaagcagatttttgttgggctctaggttccttctgggattcagcatcatgttgtgcaggggtctcctgctgggtgaggggtctttggtttgaagcaggcttctgttgggtattggatccctgcagagtcttcgattctggctgggctatgggtgtcttttctggcccaggctctagcggggttataggcctctggtgtggttcaggttgccagtctgacctagacactgacttagaacctggctccattgttatttccctcacgggagatattgatcttccaggttctatccttctgggctcccacccagccctctctcttcacagatctctcattgattcctcatgatggcacttcctcttgggtttcactccatcctagcatcactggtcttcctttttaaggcagctggcagttggccgatcacagctggcccccactaagtaatgaactctgtgcctctttctttggtgggaggattaggaataggaggaggctatgtgcctagcactctcttacaagaagggaggggcttgctctcttgtgtcataaatagggccccaccccacccaccactccgttaaaatgtttcttctcataaggcaagcatcccaatttaggcctccgtgtcatctgggatgacagaagccagatgctggatgagtgttccttttttctctttccttctaatgtctgaggaaagcgtcattcagggggcagtctctgtagttgttgtaataattatttccctctttgttcattcctacaaatggttgccagattatttatttatttacttattgagacaagtctttctctgttgcccaggctggagtgcagtggtaccattttggctcactgaagcctccacctcctgggttcaagcgactctcctgcctcagcctcccaagtagctgggactacaggcgtgcactgccacgcccggctaatttttatatttttagtagagatggggttttgccatgttggccaggctggtctcaaactcctgaccttaagtgatccacccccaccccccgcccccgggcctcccaaagtgctgggtttacaggtgtgagccaccacgcccagccaggttgctagtttaatttccttatattgtcattctgatcatttaactctcatgttaaaaactaatgtcatgccttcccacttttatagcttgaggcccttctgaatggcatttgagatactccatgccatctctctagccctgaactatgatcctgtactagattggaaactcacagaagacagtgaccactgatgacaatgactgataatgatggtggtaatggtgatgatagtagtcataaataccaaaggctgcctaagtgctaagaaactgtgccaagttttttttttaaacctatattatctttaataagaccgtgtctggttcattggtatgcttttttttttttgtcccacc

SEQ ID NO: 475 - DNA, 8050 bp, Homo sapiens
gctggtgttcaaagcccaccccaggacgcttagagatcattaacctgcccatttcatggacggggaaatggagtcccagagtcatctgataactcatagcgagacaagcacttctctaaacggggcttttacacgctccccttttacacacttactgataaagggacgaggagaaatagtcaacgtagcttcctgtgggacagcagagaaaagaggcttgaggggtactgcacgagcaaaattaggcagccactcagtatagcgtgcgagattagtgctagctccacctccttttccctaattccttcttccaactgaatcccttctaccggacccctttttcgttctgggtgattccgttctccagtagccccgccccttcgattcctacttgagttggcctcgcccattaggctctaagcccgcatctcaaccctccactcatttctgtcccttggctccagcaactccacctggtgttcctcgagccaggccccggcccacgtgctcagagccttggccacgcctcccctcttagccccgccccaccagcctaccgggccaggctccgcccccaccaggattcaccacgctgggcccggcaccttcctcaggtttttccagggccccgcccatgctcacctggagcgcagaccgtttcgcagaccagcgggcagagatagcagaactgacagtgctggaggcggggacggggagagagagtgagcgtggggcgtggccgggggcggagttaggatggggccgggaccagacccggaccagaggctaggtctaggttaaggttggagtcaggatcgcttgtggagtcaaggttgcatcaggggtaaggggttgggtcagaggccaggatttagggctgggggtcctcagagggtcccggtgcatcctgaggcccagtggagccttgagtgtgaggtgaggtctcacctggcactggtcgcagtgctcacccatgttctcctcatcacagtgacagctctcacattcagtgcatcgctggggaccgggggagcctggttagatggaaactctaacgccacttgggaggtacccgcccctggcccacccctgcaccctggacgcttccccagactctaccctctttatctctaacactgagctctgtatctgccccccaaaccagcctcccctcccctcccctgcccctggtttccttcctttccctttttttccttttttttcttgaggcggagtctctctctgtcgcccaggctggagtgcagtggcgcaacctcagctcactgcaacctccgtctcccgggttcaagcgattctcctgcctcggcctcctgagtagctgggattacaggtgcgtgccaccacgcccggctaatttttttgtattttttagtagaaatggggtttcaccgtgttagccaggatggtctcgatctcctgacctcgtgttccgcccaccctggcctcttaaagtgctgagattacaggcgtgagccaccacacccggccctgcccctggttttctatctcagggcgaccccatgtctccctgtcagggtgggctcaggtgctctctccacccgctctctgcctattctccccctagcctatcagcccctgtgccatccctccttcccccgactctctttgccacagacccctgtctctgtccccacaccccaagatgcagcttgggtcttgtcctctccttcctggaccactgccccagcctcccagccttcagtctgtcctcacctcacatgcctgcagaaggatctcttttctttcagaactgaccctggcctgcccttgctctgagccctcccacagcaccaccccagggcccctgggacagattctggggacaccttggtgggtggatctgggctggggacatacattgcagaaggagcagtagccacacagggaccctggctggtagttcccatactcctgagcatcctgtggacctgcggggacaggagggcagcagtgacccaggctgactcggttccttcccacccacaccagcccaggccacttacctgtgtcctcaccgctttcctcctcgctggaggcacctccagcctcctctctcctgtccagtgggttggggatgatggtgaagcggggctcatcttcctccagcccctcctcctcctcctcttcctcctcgctgtggtctgggctcagtggggccccaacctcagccctctcttccctcctctcctcgtcttcttcctcctcctcctcctccttgtcttcctcttcttcctcctcctggttcaggctgaggccatgaccttcctcctcatcctcctcatcttcctggtcccggctgccatgatgggtgcctttctctccctgctctgaactttcatcgtcttcctcatgggagccggggtcctcttccttctccttttcctcctcagaatcatccttcctcaaatggcttctatccttgaccactgtgtgtcctggggggtgatggctcatctctttgatggaccctctttgaccatggccagtttcttcatcttggtggctttgcctgtggctgggggcctggtggccaagctcagcagagacctcctcatcttcctccctggggactctgtggtggtgatggtgagggacttctgttttatactcatcttggaagtcctcttcatcactcttgtggcctcgaggttggtggcttgcaacatagtggccgaactggactgtgatctcctcttcttcctcttcctcatctacaaggccatggtggacatgttggggaccctggtgccaacgttcagtggacacatcctcatcttcttcctcgtctctgtggccttggtgcctgtggtcagggacatgatggtggtgttcacctgagacagcctcaacctcttcctttctgtggtcttggtgcctgtgggcctggtgtccatactcagtggagacatcatcatcatcattgtcatcttcttcatggcttcggtgcctgtggctggggtcgcgatgatggtgtccatctgagacatcttcatcctcttcaatcccgtggccttggtgcctgtgagcctggtgtctatattcaatggagacatcatcatcatcatcatcatcatcatcatcatcatcatcatcgtcatcttcttcatggccttggtgcctgtggctggggccatgatgatggtgtccatctgagacatcctcatcctcttcactcccatggcctcggtgcctgtgggcctggtgtccatactcagtggaggcctcctcttcctcctcctcctcctcctcctcctcttctccttcatcatcttccccatcatggcctcggtgtccatgcctgaggatatgatggtgatgctcactggacacaacttcatcctcatcctcgtcttgatggctgtggctcctgtggctggggaggtggtgcctgtgctcagctgagtcttccgtgtcttcactcccgtggcctctgtgcccacgggcctgcccaccatgctctgcaaagacctcctcacctgagacaccctcatctccgactttgtggtcttgggacctgtggcctgggagtaggtgcccatattccttggagacatcttcatcctccttttcacggtctgggtggctccagaaatgatgcccattctctgtggaaacatccttgttctcatctggatggtctctagggctgtggaggtggtggcgaagctctgctgatgcctcctcggagagcccggcgactccagtgctgttgttccggtttctgaagcctagcccatcccctctgagctgctgggtcatggccggggggaggagcaggctggccaccccagcccagaggacagaagcgtgcagccatggcctatggtggcccatggggacggacaggcagcactggctccagctgcctctgcggcaatgtggacaaacgttggggtctttgtccctttggggttggtctctttttttctctgtgtctctcctttgtcctttcggtctctgtccaccttcctctggtccttgctgcctggctctggacacccctctgaggctgtctccggagccccctgacccccctctggggccctccctccccattccccagccaatagggtccttcccctcccctctctccagctaaatttactctcagccctgagttattctgggtcagtccccgcctgcctgcctcctgctcctcctcctcccagctggggaggggaccagtgaggggtctctccctggccaggagacggtggccaagggacttgactttgaactaccaacaagctcacgtttggcagctgcaaagacaaaggctagacttttagcaggtttttgggggagcctggggcacctgggggaggcagaagagacttatcagaggggagagactcctgggacggaaggactgggggttcgattgcggggtgtttccagctggaatgatacgtgctggtgagagagtgatgtcagtattgaggccctagaatggggggaaaggaacatggcccccaacacacgtgcccatgacctcctgtccctggaactcagatctgggggcagggactgggctaggccagggctataaatacagctgggaggggtagggggactcaggttacggaggccacagctgtccccatcacagagggctggcaggagacaagtggccttgcccgtctctgtgtgtcagtatttcctactcctcacccttcatgactgcccccactagggtctcctttcctgttcacgggtcctcctctctcttcaattctgtcatctgctctctcagggtccctgtccctcctccatgggattgcctctccctctcactctgggcttctgtcccactcttatcttagtgtcagtcctcccccaagtctgtgtccctctctctcccctaaatctctggcccctcctttctgagttcctgcccttcccccaattctttggtttttgcatccccctctgccccttgcctcagtcaaggtgtctcctccccatctctggcatccacctctctgggtctctgtccccactctctctcagagtctctgtccccctctgtctcagagtctctgtccacctctccctgggtctctgtccccctctctctgggtctctgtccccctctccctgggtctctgtccccctctctctgtggatctctgtccccctctctctgggtctctgttcccctctctctgtgggtctctgtccccctctctctgtggatctctgtccccctctctctgggtctctgttcccctctctctgtgggtctctgtccccctctctctctgggtctctgttcccctctctctgggtctctgtccccctctctcagggtctctgtccccctctgtctcagagtctctgtccccctctctctgggtctctgtcccctctccctgggtctctgtacccctctccgtgggtctctgtcccctctccctgggtctctgtccccccatccctgggtctctgtccccccctctctgggtctctgtccccctctctctgggtctctgtcctcctctctctctgggtctctgttcccctctctctgggtctctgtccccctctctctgggtctctgtccccgtctctctgggtctctgtccccctctctctgggtctctgtcctcctctctctctgggtctctgttcccctctctctgggtctctgtccccctctctctgggtctctgtccccgtctctctgggtctctgtccccctctctctgggtctctgtccccctctctctgggtctctgtcccctctccctgggtctctgtccccctctccgtgggtctctgtcccctctccctgggtctctgtccccccctccctgggtctctgtccccccctctctgggtctctgtccccccctctctgggtctctgtcctcctctccctgggtctctgtccccctctctctgtgggtctctgtcccactctctctgggtctctgtcccactctctctgggtctctgtcccctctccctgggtctctgtccccctctctctgtgggtctctgtccccctctctctctgtctatccctgggtccctgctgccccaccttctgattctctgtcccctaagtctttgtctccccctctttgggttaaattgtcccctccctgtctggcatcctcctttctgagtctgttccctctccgccactggcccccaactccttctgttcccatctcgcgcttgcccttggagtctcccctgtgtgtctctctccccccggcccggacctctgcaccccccaggtcgctgtccctctgtccccttatcgcggcctgggacccgccctctccccgcctcccgctttggcgtctccaagactccccgccccccagacctcgccccgccccaggctaggctggaaagtggaggatccggtttgctctgggcgggtctggaagcagagccggcggagggagcgccggggccctgggctgcaggaggttgcggcggccgcggcagcatggtggtgccggagaaggagcaggtgagcgccggaccagggtctgcgggagcgcggagctggggacctcgcctccaggctcccagagaggagggcgctggacacccagattcctgggtcagacggaggagggggatgggagggtccaggttccagggtccagggcatgggggtcgagactcctgagtctggagcgggagggcgctgggggcccggactcctgtgtccgtggggagcgcacggggtgggtggctctgtgtcccataggacagaactgggtgccctctcaccccacttccacccctacatttgttcctgtccccagagctggatccccaagatcttcaagaagaagacctgcacgacgttcatagttgactccacagatccggggtgaggagttcgcccctggactgaccccagagggtccgcggcccgctgaccccgcccgcggatggtcacgccccagccctgctccttccccattcctggactcggggaccttcccaagggcgttccttgccgacgctctccctctaggagcgtttgggtctgtgtagacacccctcattccccattcgccattctcccgctcagggtcagtgtagacgctccagggctcggttctgcttctttcctccccgatgtctcttctatgtgcttctgtctcttcgtgtcactttctgtgtctctgtctttcccttttgggtatttctgtttcattcattcattcattcattcattcattcattcatccatccatgcaagaaaccctcactcagcgctcccaaggtccctttagcctaattcaacggccctgccagggttccaatttcccctgggacacgtgctgtgtggcttcgggcaaatcatttcacctctctgggtcccgtttctcatctgggcatcaaaagaggcttgatctcctggggttattatgagaattaaacaagttaatgcttgtgatattcctggcacagcgcccagcacaggacgctgggaaatatctgcagctcccactgggaggtggcaattattaccgcgggcgggccctgtcttggtggccggggacaccaattgagctagatagggtgtgtgcgtccgcgaggagctcccgcccttcagtgacggcctctcaagcggatccaggctttctagtttttttttttttttttttttttttgagacggtgtctcgctctgtcccccaggctggagtgcagtggcgcgatctcggctcactgcaagctccgcctcccgggttcacgccgttttcctgcctcagcctcccgagtagctgggactacaggcgcccgccaccacgcccggctaattttttgtattttagtagagacggggtttcaccgtgttggccaggatgatctcgatctcctgaccttgtgatccgcccgcctcagcccctcaaagtactgggattacaggcgtgagccatcgcgctgggccaattttttgtattttttttttagtagagacggggttgcaccgtgttagccagatggtctcgatctcctgacctcatgatccg

SEQ ID NO: 476 - DNA, 8050 bp, Homo sapiens
caggaggtcacagctgggagtgagagctgaaaggaactttcccacctgcaggcctctctcctttacacttggagaaactgaggcccaggcaggggaggagcctgtctacatcaccacctccagaggagcctgaacctaggacagaacccacccctgcctccccgggaccccgcccacctcccactcagagcccctcactcaccactttggggatccgacccagtgggggtgaggggctggtcctcagggcctgctgggtcaggacggggaggtgagggctggggctgccctgctccccacatcagcccggctgctcctcccccaggctgggccccaacacttctctctgcctcgatcccccacccctcaccagcccagcctcagagccctggggaccctgtggcccctcctctggctctgcccagctccctggacagaagcccttgattgagtccctgaagggaatgggatcctcctggacactcaaagctgccctgggggtcgctgcgctcccttcgagccagaggcctcagggactcaccaggtgtggagatgggaccggtgggtggggggctggaacccatggagggtcctgggtgaaagaatgagaggagggtgaggagctggggctttcctgaagtctccacctcaaaccaaatttctctacatgggccctgtggcctccccaggcccctccctccacccgcctctcctgtccatgatgctggcgatgccgctgagtgtgcgcaggcctgggagggcctgttgtcctccttccctctgagggtgagtctcccactggctgagccccgctcagacccccgctcactccatcccagcccagagctctcctggggggcagggcctgagctgagcctttgagctcagagaggacagggtcaaggcccccacctgagaccacgagctccaggggctcactggggtgagacagcaggtaggggtcggagttgagtgagccgtagcacctgtaggtccccgcgtgggctgaggtcacaggactcatggggaattcagcctggtacttaggatattcgtgtattgatcttagacggagtggggcatcagctgctcccgccttggtcagaaggaaagtgtggaactgccgccatgactgacacagcagggtcacgttctctcctgaggccactgtggggcctggctgcactgagatgaagggtgtgccacggatctgtcctggagagaagaaggatgggtgaggggctgccccaccttgctctgagctgagacctccccaggcctctctaggagcctctgtctctgttttctctgagtcttcccctccccacccatcccctgtctctctctctgtctctccctcccttggggaccaccccccgcctcatcctggccatcactaattggattcccccggcagggcctgtgcagagtctgggtccctgactgaacccgctgggctcctcacctgtgatcaggatgtccagggggtcgctgggggccgagcactcagaggagaggttgtgtgcaccgtagcatctgtactggcccccgtaggagcggctcacagggcccagggtgaagttggcctgggagagcccagcctggggctgccggccagggagctggcgaaggtcacgttccccctccttgtacagaacaaatctgtcatagccgacatcagagacacactggagggtcaggctttccccaggggccacgacaggacccggctgcactgagagtgatggcttcttagaaacacctgggaaaaggtgctcatggtttccaggagccgaccctcaggcttccccacaaaccctccctctcccccggtgcctcaccactgctgatcttcctgtgtctctggccccaggacccctgagccctctcgccccaacatcatcccacctggaactgccctgagacacggctgctccccacctgcctggagactcagggagactcagggaactccagacaatgctgtgaatttctcacctgggaccaggagctccaggagatcactgggtgaagaccacacatagggagagttcaagtcataaccatagcacctgtgcgaccacctgcgattcgggctcacggggcccacggagaagatggcgcgggacgacccacgggcatggggctgggagttcaggcattgtgggtgttcttcttctccttccttacacagaatgaagccgccaaatgccacctgtgactcacactggagggtcacccttcctcctgaggtcaccacagggctgggctgggctgagagggtgggttttgggtaggctcctaggagagaaggaggcaccgtgttaaatggggctcccacctcccacatcatccccagggctgggctgtgagagggagacacccctgagagcctccttcctgagggcagagcctggggctgggatccctgagtgtcctctcacctgtcatcaccagcaccagggggtcactgagctcagaccaccgagcgcggctgtaatactgacagccatatcgccctgtgtgttcccaggtgatggatgggatgtggaactggccgttcttcacaagctctggtcgtatccgtgtaatccaagatgctgattttttctccctatatagacggtactcctgggcttcaaggctcccctgacaactgagggtgacgggactcccctgggtgatcacagagtctggctcagcccacagggtgggcttgggaatggtccctggaaggaaatcaaaggtcagattcgaagtcatttcccacccaacagatctcagctctcagcccaggaccctccagatgcccccatcagtcagtccagaacttctaatccccatccccagctgcacggaggtggccccttgtccccagtgaggaggagggacctgggagagctggggacagactcacctgtctgcacgtgggtcctggggcccagactcagccctggaagagagttccctgtgagggatttgccccctgaagcctgagcaggtcctcccctccctgggatctttgtgagcccctggggtctccttagggaccagagtttggctgtggggtgaggtccctcctaggttagaagctcccctctctcttcaaatctcaccgagacagatcaggactgtgacgatgggggtcatggcgtctcctcccactgccctgctctgcggatggatgagccctcggtgctggcgggacagagacacacagagagaaatagcctcccctccttcccaccctgtgtggacactcagaggctgggtccttctcatggggtgttgtcatctgcagccacacaagaagcggaactgccctcccaggagcctgactctcattcttttagagctgaggtgggggcaggcactgggccctctgcagacatttcagactgtaatggggtctttcctgacccccagccactgtctgtctggtttctcctcgtctcaccgagagccgggatgtagcagcaaatagaactggtgcttcttgtgtctgcccttcctgatgagggtagcagtggcttccccttccttctcacagcttcccacatggtcaccctccctccttcagcccatccatcagcacagcgttgtggggtccttaccatggcagtcgtccctccagccctggagatgcttcagggaagacccaggtccatgctgcaggcagactcagatcagcagagaagcatctcgcctctggctgtgccgtccaggttgagctgcgtgtggcagtgagcacagaggagaaatgcagggaagtaggggaagaaaagttgacttctttcttgacactggattgtgggttttctttcaaccaaatagtcccctcttaacttcccctttttaaatgtttttgctccagcgtccactccctcccccccgggaagaaacctctgagtctttcctgcctcctcggtgcccattgcgtccttagccgtccctctgcacctcaattcctggtcaacattttgggaacaatgacttatgtttgagctttgatttggggagtgggggagggagttgatatttatttgatgactggttatcatccgctgcctacgtgaccttggtttgtaatgtcccatcactgagcctcagtttcttcctttgcagattgttgtcatgaatcccactcgtcacagtggttgtggggtcagtggtgcctgggacattgggaggggctcatttgtgcttgatttccagaccagggtaagacctgaggctttgggacgtgagaggatcttgctgttggactccacattctgtaggtgattgatgagtccactcaagatgtcacatctgaccgtaatggagaaacgtatgtgtagcatttctgaaatacccagagtatcaaggtcatgagcagaaaaagacatgtgaaaaccccaagtgtagacggactcacaagaaagaacagaggccagaggtgagatgccacagggtcccgggaccatcaagggctcattagggtggaggtttccaccactgagtggagccgggagaggaaccccgggatctgcaatgacagtgaggggctcagggctccagaccaaggtgggaggctgcgtcctctagctacacctgaggctggagtggaccccaagcagcccaggggaattccctcaagggagtgcaccaaactgtccagacctgctggaattccaaggaaagaagcactaaacaccagggtgttcatagagcatttattagggggacctctgcacagtggggcatccttgtcttcttgcccagtgtctccttgtggatctcaaggatgtgcttccacatagcagcatgttcttcagatggacaaggagacactgggtattctatccaaagctttaacctaaaataaaaacaaaaccaaaaataaacccctagaaaatatgatctctcagtacagttgtttcttgggatacacaggcaattcgtttcagtaccccctacatgtaccaacacttgctcgtactccagccctgacgttgtctctgctgggtctgcatataggaaaagtctgccgttcatatacgcaagtcttgtttctcacaaatgctatagttttgatccccgtttgtttggaaaaagtgtgcatataagagacccctggaattcaaggctgcattgctccagggttgcctggattttgagtttatttgggagtgagaagcaaggattacaatatggagtgcatggcatggcaagccacagtgtgtccagagagggaagtgtgatgttgtgatatatgctggttttcacccgcagttcctggcttgtaactcccatagcccttgttatagtcttttgttataacattggctgtgctgggcctcagcggaggcctctgacctcctcctgcccttccttcacctaacccaaagtaagactcgaatgttccctgcctttctgatagtggatcttaagaccctcccagaagacagtctcaccctgttccttgtgggaggaaatgctgatgtcatgaagctttcataaaagccccagaggactgggtttcatgagtttctgggtggctgagcatgctaaggctcctggagggcgacgcccagggagggtatggaagccccgggcctcttcccccatgcctcctcctatgagtttcttcatctgtgtcctctgcagtgtgctttgtattcaaccaggaaatgtcagtgtttcctgagttctgtgagctgctacagcaaattaatcaaaccgaagagtggggcatgggatccccaacttgaagccagtcagtcagaagttctggaggtctggacttgggaatggtgttgggggcagttttggggaatgggccttcaatctgtgggatccgggactgtctctgggtagacagcaccagagctgacttagaggacacccagctgctgttcgctactgcgtctggggaaaaaaaccccatacatctggtcctagaagtctttttctgtgttgatgattcctgtgacgtgagagtagaggaaaagcaccgtagagagagctctctgtacatagagaggtaaaggaagttcttatcagcaacaagggagagcctgacagagctgcctggaaacagagttccctggttccacaggttcaaagccagagttgctgtcagtccattggaggagatgctgttgctggtcaatggttctcttgagagcatcttatctgaattcctgacgtcctaaagaacatctagtgataaaccttgtcaaagcagaaggggctgaaggacatggaagagtttcttatgggttttttaaaagtccttagaaacagttcttatctgagacgtggaagcatgggcctcctctccttcaggccttcctggccctgtggggtctgagtttgaccaaagtcatctcatccttgcacctgtaacttttctattgggagtctgcagtgaagggatggggttacgaagtttaacctgagagtttcaggaatttggttcaggggagggcttgtttctacacttttagcaaaagggttaatttttcagtgttttctagaaacaacctaaagtgctttatcagtacttggggatgctcaagacctcagcttgggttccagcctgcaggtggaaacatgcatctgtccaacccacagaacagtcatggccctttgtctcactctcagaacaaggaaaaaagtggaggaaactgtgggaccttagagactgtgactccccctcttctgtgtttgtggacagaccctgggatgactcagtgacccgggctacactcagcactgagccaccttcccgggtgtgcatgacacagatgcgctttatcattgttggaccgggcatctctgaccctggagtgtgaggctcacatggaccccgccatgccgggcataacacagaggtgattctaagcttgggagcatggacaccgcagggcaggagcggctacagcaatgccctcatcagctttccttcctgagtcagcctggggagaaaccctatatggaagatcaggtgtgtgggagaaaaacccaccccagaggaataaaaatcaaagagtccgttagagaaaaaacaggcaattgtagaaatgaattaggaagctattgtgatgtgaaaatagtaaattatattaacacatttagaaataatttcatccagaacaagacacagctgaaatgataaacattgtattggtgtagaatatttactaaaatttttcattagtcatcagagaaaaactagaaatgaaaaaaatagaaaagataattaatgcacacaagaaatggaatgaaaagaggaaacagatatctctctttggatcacactttcagaatgaaggaaataaggagtatgttattcagtaaatacttgcaaagaaaatggttgacatttttatagaaatgaagaaagaacatgagtttaacgtgaacaaattcataaataacatcaatgtcttaactatgatagagtaaaagatacctagaatagatacaaagtaattttaaaactactggagaaaatgaaaattattgtccaatgaaagacaagcacattgggactggatttcccaagagtaaaaagtgcaagaaaatgactgggggctgaggttcaagttggctgaatggaaagggctggagtctgcctactcactaagaggacccaaaatagcgagtaaataccaacaggtcaagtggatcttccaagaggatgctggggttcacctgagaaacatgaggacatggagagaagagaagagaaaaggtgggagccaggagaggctcctaacacggggaaggggtgagtgagtgagagattcaccaacacggggaaggggtgagtgagtgagagattccccaacacggggaaggggtgagtgagtgagaggatccctaacacggggaaggtgtgagtgagtgagaggatccctaacacggggaaggggtgaatgagtgagagcctccctaacacagggaaggggtgagtgagtgaggggtccctggcatctacacctctgctgtgggcccttaggatcctgcccacaggagagcgcctgtcccctctgggcctcca

SEQ ID NO: 477 - DNA, 8050 bp, Homo sapiens
cgggaacacatacgtaatccaacacactagctctggcacacacactggaatgcgcgcaaaaccacacagacacagaacacacgcggttaccaaacctcattctcagaggccacactgatccaacctcaagcagagtctgatacagcatcggtctttgtctctgggtctctcccttactcgcgctcacacacccgtaccccaatcaacacaaacagcccaagctttcacagcctggaggcggccgtcggagcagggccccagcgcaccgcgagcctctgcttcctccgccttgcagcgccgcgagcccttctttcctccgcgcctggccccgtctgcgcccctctcggcgtgggcattcgcagacccgctaggaggctgacgagaggtgtcctcatagagtcctgccttcttccagacccccaaacgaaaagaaagagaaaagccaacctttcgcctccattctgcacgcatttggagagcggctggtggcgagcgatccgcacaatcgcttccctcgcggcgtccctggacgggcggagagaacccgggtgactgagcctgaggctgagcttccttgggagcgatccatgccagccacttctaccttcaagggggactcgcggccgggtttacgcgcgaaggatgggtgccagggaaactgacttatagacgacccgctccgcgagagactgacaactcagtcctgcgggctttcggggcgcccagaccagtccttagccagaggatctggggctgcacagctcccggaccctggagggggtggtccgggggtgggagactgcgagcatcagcccacgccggccccctcccaccctgcggcggcgaggtgggaagggccaggatgcgagcttagcacctcccctagaaatgcagcacttcgcccccccacctcccctgccctcggcgctccctctttcacgcgctccctcccgcctccttcccaagggcgcccttcttctgcccccagctcacgtctgaatccctcggcgccccctttctcttctcctagccccttcctcacgtcccctgcctccgggtatttcctctctccaatcccccacccccgcaccgcctgattccgaggggcgggagcgcattgggctgcgcacgggtgggggcgccgcgccagcttcgcgtagctgctctgacgccgctgccgccgccgccgccgccgccgccctccgcagcccagctcgcgccccgcggcagctccgcagtgcactagccaccaccgccgccgccgccgctccgccagacctgctgccagcttgcccggtccagccctgagagagcctcgaacgccagctgcgagggtcatgagccagagagccccggggcgccgcgcggagagcaagcggagatagcgactttgcgccccccagccctcgccttcttgcatcgcgttccccgcatcctcgggtccttctgtcctttccgctgtccccaccgccgccatggccaccttgctccgcagcaagctgtccaacgtggccacgtccgtgtccaacaagtcccaggccaagatgagcggcatgttcgccaggatgggttttcaggcggccacggatgaggaggcggtgggcttcgcgcattgcgacgacctcgactttgagcaccgccagggcctgcagatggacatcctgaaagccgagggagagccctgcggggacgagggcgctgaagcgcccgtcgagggagacatccattatcagcgaggcagcggagctcctctgccgccctccggctccaaggaccaggtgggaggtggtggcgaattcgggggccacgacaagcccaaaatcacggcgtgggaggcaggctggaacgtgaccaacgccatccaggtaagcgcgggattcccagttctgcctgtcctcccccctcccagctcagcgtgccgggctctgcccccgacagtcgcccggtgatctcggcctggagaccccctcctgtacccaggaatctccctttctccatccctcccagccctgcgcggggacctacgcccccaggcggtgttttccgccctaacccacgctccctcccaacggcaccagctgcaagaccgctaggctgaagttcggtctgagacacctgtccggagacactgcaaaagtgaaggaaatggggggagggagcaggaagcgatgagaaagaaagaaaatcaggattggagggcacggtttggtcttggactctggaacggattcacagctgcatttttgggaggaaagaagaaggggaaatcgctgaggtcggagtctcctccccccgcacacacgcatagacacgcacacgtatataggcaggcacaccacatgcccacagccccccttcccacgaacaaaggcgcaggcacaggcgcacacgacatgtatctatatatagaccacagtactatccccaaatgcacctgcgtacacccctacagctccacaaacaaaagcatatacctgcacataccaaacacacgaatattcgtttgaacatatgcacacacacatgcacagatgcatgcagacaggaaccagcctgctcccttgggtgcggccctgttggagacatacaggtatacacacacgaaagcacacacatgctcccacacaaacacatttagtccgcaataatccagcattacctgtgcacagactcgcccctctcgcccgaaatcccggctgcaccgcaaagaggcggccagctcctccccgtgtgaccctggcgaagccctctccagaggctaagaatggcccctgctctctaggccctctccccttattcctaaccccccactccccaccaggcggcgcaggactcctacatagggagcaggtttggagtcttggcaacgacctccgagctagcaggggctggcaggccgcagctttctgggccgaaggagacttcagctctaggcaaccccggtcccttacagcttggccccgcggcgtccctggagcgcactatcactggggccacggaaggcaggttttctgggagcagaggcctcccaggggttgttccatgtatcggggtaagcaggactccaccgggccccgaacaccagatggcccgacccaaggcgctttccgctccggggcccggcgagacggccttgctggatcacggacccggggctgctcccgccttcgctgtgccccgcgacttcccggggcgtctttcaaggctccgtttgataggccccaagggaggccagggcaggaggctggaggctcgtaggcctccgggaccctggatttcgttagctcttagtccccgtgtggattctaaaccctacagccctgtccgcctgaccctgaagcttctggttctagactcttgctcggttcggctttctggcctccctggcgccttcccgccaagctcctcctcctgcttgcctccccagcctccacttagtccccttccttaggtctcgccctcgcctcactctaactccagccttgtcctaagactctcaatttccagccctgcttcctcctccccgcgcgctgctccccaagcgtcttcacattgtctctgttcttgcctcccaggggctttgccccaccttcagcccctctccctctctaccctatttccttttcgcctcacaactgcagcctttaacgtttcctcctctggtctgagcctgagacgcccgagttttcctctttagctcccgtgccccattccagccccaccacaaatcccgtgcccactctttccactggcccaggcccagctcactacctttcttagagcccctttccgactacgctcccttctgtcccttctcatctcctcccccaactcctcattctgttcctgtccccagaaaccatcccgaagtatctcccttccctcctgtggcttctccctattctcagccctctcccaccctagccctctcgctatcaccagccattagcgcacctttccttctcagatccgtccatacatccctccctctccatctctggctcgacacccgggctcactattagttcccctacatccaccccgcagcctgctcttaacctctcctccccggcggctcagacccaattctcagtgtccttagcgcccccttcgggccacagcgttaagccacgccccccgggcccctcatccgttgccaagttcgctgagcgtccgcgtctggttgcctctccgccccacagggcatgttcgtgctgggcctaccctacgccatcctgcacggcggctacctggggttgtttctcatcatcttcgccgccgttgtgtgctgctacaccggcaagatcctcatcgcgtgcctgtacgaggagaatgaagacggcgaggtggtgcgcgtgcgggactcgtacgtggccatagccaacgcctgctgcgccccgcgcttcccaacgctgggcggccgagtggtgaacgtagcgcagatcatcgagctggtgatgacgtgcatcctgtacgtggtggtgagtggcaacctcatgtacaacagcttcccggggctgcccgtgtcgcagaagtcctggtccattatcgccacggccgtgctgctgccttgcgccttccttaagaacctcaaggccgtgtccaagttcagtctgctgtgcactctggcccacttcgtcatcaatatcctggtcatagcctactgtctatcgcgggcgcgcgactgggcctgggagaaggtcaagttctacatcgacgtcaagaagttccccatctccattggcatcatcgtgttcagctacacgtctcagatcttcctgccttcgctggagggcaatatgcagcagcccagcgagttccactgcatgatgaactggacgcacatcgcagcctgcgtgctcaagggcctcttcgcgctcgtcgcctacctcacctgggccgacgagaccaaggaggtcatcacggataacctgcccggctccatccgcgccgtggtcaacatctttctggtggccaaggcgctgttgtcctatcctctgccattctttgccgctgtcgaggtgctggagaagtcgctcttccaggaaggcagccgcgcctttttcccggcctgctacagcggcgacgggcgcctgaagtcctgggggctgacgctgcgctgcgcgctcgtcgtcttcacgctgctcatggccatttatgtgccgcacttcgcgctgctcatgggcctcaccggcagcctcacgggcgccggcctctgtttcttgctgcccagcctctttcacctgcgcctgctctggcgcaagctgctgtggcaccaagtcttcttcgacgtcgccatcttcgtcatcggcggcatctgcagcgtgtccggcttcgtgcactccctcgagggcctcatcgaagcctaccgaaccaacgcggaggactagggcgcaagggcgagcccccgccgcgcttctgcgctctctcccttctcccctcaccccgcccccaccagcccagtgcgccctgccgccgcgcttgggaggccaagctttaaacatctctggttcctagtttctgattattcggggatgggggggatgggaggggacagggattcacgatccatcgcgtctgcgtttctgttgtcctttcttttccacaacaccctggttttggggggaggcggggtgcatttgcgggcagggttctctgtccttccaagtggggccccgacactttggttccagtcatcgagggggttgggaagggagggagagggggcgcagctcgcaggcgtggcaacttgaccttgggggaatatttcacatccatccagagctcggaatctacagcgtccagccatttccagcaagagcgcttcccattccggagacgtttcaaccctgcagcgggaaaggctgactgggaaatccattttgggtgggcaatttccttcaacgaagccggaaggcgagaagccgcggcggggccagcttgcctgccggttttcaggaatctaaactctcatcttgtgcaatttatcaggtgtggaactgttctactgtgcgtgtggtgtgctcgtggtgaataagatgaaatgtatatcagaaaaaaatctatctctaatttagagtgcggtacataattatatccgcaaataaagaagagacaaaggcttgcgcggcccggtgtcgggtttgtgtgttcgtaccagccgggatcccctggcgctgggaggcgtgggaactggctcccgccggctgaaaccggagatggtgagcagctgtggttaaagggtccggggagggctctagggagtacaaagattagttggcggcgaggaggctcctcaggtgtgaggaggaagctgaagacggagagtgctgtagcggccccctcagctgccaggtcgaggtttgttcgaatctctcccctgggggcgggtccatctgagaatttggtggaagctctcaacttccaacctcaaaacagagagggacagggggagcttttatgtaccagaactttataaatttgttcaacaaatatttataaacagccaatcagggctggggcagtgttggaaacctggggaaagaaactcagccttgccttccgggagcttacagtctagtgaggtggagacaggcaataaacaaggacaggcaggaatccacaacgtgacttcagattgtgaagagggctacaaaggaagtcagaagtgggctgtgcctttcaccaggtccccagagccacgagccaatctggcccggcaggaggcatctgccacccaggagaaccctgccgtgcaatccaaggtggggtttgcacagccatagcaaagagatctgactctagaatcaacagcctcaagttgtagggtcccagtctccccctatcttgcgcagcctgtctgataaagtgtttgcctgaattacccgaaagatctagtcttttttgtgctgatcccactccaggcgcagcacctgcactgactccaggagggccagtccagggactgttgggaaaggtcagagtcagactttctgggtgggagctgggagtgcaagtccgctgggtgggttccagggtccgctgtcaccacggaggcagaggcttcgttaggaacgacttctccaggtgcgaatggtgcacgggaaagaagccagggagaatgcctaagtagggtgtgtgttgctccccgcccgcttgcaaggggcatgtgagaggctaggtgaagatatgcgtgtggggtggggcaggctgcatcgtgtgttgtgagaaccttggtaagtgtgtgtgcgtgtgtgcgtgtgtgccgagcatccgggtgggcgtgctccctaaagcgcctgcgacagaggtgacctcgcatcaccctggttctgcggccacagacctggagtgggaagggaggagggataggacccggtgtcctcagccatcactgtggctctaatgctttaaaacgggccatctgagaagtccgctaccttcggcctaattccccggggtcactattgtcgcgtgttcaggatccggcactggctgaagggtcctcagtttctcgtcttcccatgaccactgacgtctcccaggcctggggccgaggggtggggtggggagctgattgttcttcccccgccccaactcccaaggtttctcagcgggtccacggaccctggggtgctctccgagtcagtgtgtcgccttcagaaaaatcccggacttctatggtggaagggaaggtgggagcgtcacgctgcaccatctctgtccttcccgtctttaaaaggtcgaaggagacactaggcaggctccggatagcggcgccaactctgcgggctcgcctggatccgctccactaatcctggctccaggttttgtgctcagcttgcagcgtctcttgtcctagggggcgaatcctgagggtggcaggggcgggagaactagcaccctagacgcccaagggaaacccgaaaccctggtcggtaggacaccgatacccggactcgcatccaggctactgagagaaataaggaggaggagtggatggcacccgtctctgcacctctcatctcccccacccatctacccccacctc

SEQ ID NO: 478 - DNA, 8050 bp, Homo sapiens
atgatgtgctttcggcttaaacctcgctcggtttctgccctgtaggaaaaggtaagtcaaagatgagatgtgacaaagataggggaccggggctggcttggagccataaggaaatgggattgcacgagtcttcacaggcatggtgcggacctggtgcaggatagctgtccccacccccaccccatacaccttcacacattctttgtaggccttctccacaatcgcagtggggcagccacttactgtcctccccaaaaaatcttggtagtgatgacatagcttgatctcctggaagaatagaaatgggagaaccagtaagaaaaggatttttgggtgatcacatccccagcaaccccccaaaacagtctcacctccaacctttgctcttgaggatgttccctagggttctttcagccctaaaagaaacataaggcagagccactgatcccttctaggccaatcaattccttcctctcctccccaccttttcctctcttgcaaagtaggatataaaccaggagtccatttcagctcacagccccatcctggacaaaataagaggtctgttggaaggaactaggggtgtagttgtatagttttcatcacatattcaacaaatatctgttgtgcattagctgtgtaccaagccctgctgtgggtgccaaaaagatagaataggatgaggggagaggggccaactatggtggagccaggaaggacactgccttgtctggcttcaactatctgggttgccctcctccttctttgagcctctgcaaaatcccacccgtcctccaaagctcagctcaaattctgcctcatccataatgtgttctctgagtgccacaatctatggtccagccttctggtcagcttccacagaattggctacataatttagcataaaattatgagctcacttatgacaagtcttaagttgtcatggtggactgttactgaaatgttttaccgttgtttaatctttcctattgccctttttttttcctttaaccacttagactgtgtgcactttcgcagacatgttgattcttcccagaagcagcacctgctctgtgccaggctctgtgtgggtacttggggaagagcaagacaagttccatggaaggaggcctctgacttgagcagctaatatagctgcataaaccacgaattgcgtgtcagaaggcagtccacagtgctttaggagctcatggtgggggagggggtgaccaactctggggagttgggcaaagttcttgaaggagcggacactcgggtcaagtcttgaagatgagcagaagtgtttgctagatggggaagaggcagggtaggtcatcctaggttttccctgctcctagtgtgaaacggcatgatgtgtttgaaaattcatctttgtagttgcacataactaatgcctcagatatatttgttgcctttatttaatgtagctgcacagtacgcccattgacttctaagccagagagggactaatgttgggactgtagctcctacagtgctttcgggtccctccgccaaaaggttggaacttcacgttctcagaagtcccagggttctttagagggaaaacgagaagataatccctggggtcctctcagccttccaaatggagcttagctctttcaccccagtccttactttcctgctgcgtacacttcggcggtgtcaaacaggtttacaccatgctcataggctacagtcagcacatcctctgctgtctagggaggtgaaagaggtaaagatcaactactgctcctcagttacctccctcactgtactctaacccatcacatctcagccctgggttctctagtctctcccctctccccatcctccagcctcagatccctcattccctgtgcttgttgtccaaacccctatccaggttcacttcccttttttcaagttccctcacccccaccaccctgattctaggtccgataacttatacctcatctgagatctgagaaccaaatgtgacccaggtacctgcaagagagaagccaggcacatgagaactgcagggggcagaccatgaaagaatgccctcctttccttaatccctattctgactcacctaggccaagacaggatacccgaagaccagacttccctaggttcctgcaagatacagaagcagcgggaaggggtggagcctccattatggacttagattatcagcccccagctcctctccttccagactgagaagccctcaggtgtctcagtccaaagaaattagacccagtgggcctataagattgggcaagtgctatctccagagcagaggtcctaggaattttctcaaaaggacaagtgaaccatatgtgactgttcctctggagccactgtccagagtctccattccctcttatcacattgaagacgtgcagtctggtttgtccttcttctggggtcttgtctgtgtttgagtcatctgtgggttgtgtgcagtgaggggctgggaggaattttgtttgattgtggtgagtttgtgagaccaggccctcaggcagagtgctgtgccaaatggtagatggcaggttggaagaggtaaaccaagtcaagttcaggcattcagacagacaggggtccctggctaggctaggcagatgggcctggaggaaaggcagattgaggacctggggggaggggggagagtaagacagaaaagcctagttctccctctccactccctctgttcctattgacttgtgaagactgtctctgaaccagtgagccccctcatcctcccaaagcccccaacccaggtgtcagctcagctttccaatcagggccaccatatagaggggatcagattcctcaggtgacaaagcaggtcagatcagtgacctcagctcactcccaagcaggagcccctcctctaccccctacttcaggttctgagcttctggtctggcagtcctctgagataaagtcagttacatttcagtctacccagaccctgtccctcagcatggagatgaaaaatgtggtccatccttcccaccggccccactccccttgcacccaagaaaggtcgcagaagacctagcctttggggcaggcaggggcagtatctgggtcaggcaccccgagcaggccagagtgagaagctgattccctccctccactccccaggacacggacccaaggacactccactggaggaggcatagcctggagatccgtgtagcgtggagatccatgcatccctgaccttcccaggggtaaggagggaagctcaggggcatcccctgggtctgacaggacccagtcaaccttggtaaacttgattctcgtagtcaggggtatcgacagaaaccaagagagggacaaagtgagggagtgccagagacagaaagaagagatggaaagaagggagacctacttagtgaagtttgaaggggtcttggcggccatctcaagcagtctcaggggtcccgaaaggaaagcggaaggggtgggctgcccggccacccccatacctgtatttcatgccagtgcctcggccggtgctctctcggagggccccagcgggcgctgggggtcggggaaccagtgcagctcgggccttggggccagaccctccaccccccggaggattcccgtgccccccgccggccggcccaccattaccgcccccggggcccggccggggtccacacagacggtcctcactgctccggctgcgaaggttctgctcggtacacgcgatagacacctgcatgctggctggccgaggcgggggagggggctccgaggggacgggaggggggagcagggaagcccgagggctgacgaccgggggcgtagtggggcgaaccccggcagagcgggaaggctgaggaggctgcggcgggagccgccaggcaggatcgggcccgcgggggcgggctgctggaggtcgcgaggtttgcggcgggagggaagaaacgtggggggcgccaggagtggagatattcagttacgggggacacaggagcaaggattaggagggggaaatggatgagggtaaaggtcgaggatgaggtaaaggtctcggaggataaggacccagggggaagcggggcgggagagagatgccacttcagcgcgaaccgctgcgggacccgctgggctcccagccgcgtcggcagcgggcccagctcatcagcatgcaggcaccgcctcctcatctgcatagagccgccctcctctcagccaaacctgccgctcatctgcataagccccgcctgctgaaggctctgcagcttgaatattttctgagcggaattggggaggatggctcctgcaccctctgggacccaagggctgtcaggcttcccccggcccagtgattctcaatcgggagggaatgtatctcccagcgtactttcggcaaggtttggagatatttttgatttcatgcctgtgctatcagcatctagtgggtggtggccagggatgctaaaatcctacaaagcacaggacggtccccacaataaagaattatccagctcaaagcatcaatattcccacggttgagaaacccatccgcaaagccacttcgtggccctccagggggtgtggctgccctactttccaccttcatgcgtggggcaggactgagagggccctcaaaccaacacgctcaggccgcagagagtgacaaaaagtttattctgtgcttctcgcagcattaggcaggggataaaactggagagagggcctggtgtggaggtggagggactctgtgggcttcactctggtaggaggagagcatcagggcaggcctttaggctgttgctctgggcagggggtgggggtgcgggggcttacagtgggggcccttagttggcacaggttcggaagggccccaggcagacatgaattctcctgagacttgaggtaggttgcttcagccagcccgggcggagaagaagggcagagagcgaacataggagtccagtcgggagcgaaagagctcactttgcacagtttggcccagcgggcacaggggattcttcaccaccagctccacatacagctatggaaagggaagatgttagagccaggctttggatacttctggtttttagccccaaaccttgtataacctcaggggtgtgtgaatgcacaaggaataagggctggaaggcaagccctctctgaggagaaagtggtggtgggagttaagaacctaagggcccctgagaaaactcttgagttgagcaaacatatagtaggattggggcaggggagatgagggagtcttggggttctgaagagctctgggggatgggtccctggggctggcactgaccgcactgtagatgtggtgcagcacatctcggatgggtcccacgcccaagtcagtattcatgacaactttgatcccagtgggcgtctcgtagtaatggagtttgtaacggctagtttggaaggccaggaagccatccttcctgcagagatgaggagggtgttaaagaatgggagcagaatctctcccaaagagacacttctgatccccgcaaacatcgactccctctttatctaaacatatcctttgtagaagcctggttgagtaaagacatcgcccatcgtcacccctcaatttagcccccaccaacttctctactttcagaccctccccacccccactcctgccagctccagcactctcgctccggactcagcctctcttaagtaccctttcccccctctggaggccaatgctccttccacttcagaaagtttcccccatccccaaattcccaaggctagccctcctcccaacatcttctctgactccgcgtacatgtctagcggggacatcttgctgacaaacgagcggatagagaagagcatcccgtacatcagcttatactcctggagggagaggggcagagttagctctcggttgatgcgggagatggggtggggggtgggaacgagctggggtttggagaggaggggctgggttgggactataggtgtttggagatgagaggtcgcccgggctgcaccggggccctctcgtcacctcctccttgggaatccctgcttgcttcttgcggtgccattcgctgtagtgcagacacactccattccggtcaaacaggtacaggttgtggacagtcatctgcagggcagggagtgtgagcctcgctccggggccgcccccactccttgggctcgggttcccggacccacagccttccaaccaggtggggaccccacccacggactcaccggaactgctccgagtgcccgtcaagagttacttccggtttccacggagctccgccccttaggggggttctcgctcggccgcggctgggcattaactccgctccagtgctgcttgtcagactccgcctccctccctcagccaatctgtggccaccggagccgcgcacgcgcggccaggcgctcgggatacagaagtgatgtgagtgtctgcgagcgtggtctcgcgggcgggtgacgtcatcgaggcgagagaggcggagccgtggacagtgggcgggaggctgccaacggttttgagcgtagggggaggcgtgagagggggatctcaggggaggaggtcaatcgcttgccccccactttggcaaattggggactgaggactggaagggtggagagtaggcggaaccaggtggtcgtcggggcagaggatctcgggctaggcttgagggcggcgtgcttcttagggacgacttagggcgtgactgagggttcacaaggtttcttttggggtggtcgggagggagagattctagggaacaaggaagctcgctatggctttcttgccaggaggggtcgaagggaaagtacaagggagctggagctgaccctgggtagaacgggtgaagggatgggggagcgtgaggttccgccctctcttgagactggaaccaattgagggactagtagggcagggggacagaaattgggctcctagtggatttgggtccgtttccgttgggacgttttgggtgtgagaacttaagagctcagttgaccggggatagcctgtgccggagttgatctgcagcttccagcactcgtagtcgggaagaggagcttcagcagcgctgttgtcccacagtaggtcttctgtccgcacccgctctgcgctgcaccctcttaacgctgttcccaggagctggggaaagggatgcttttgcccactcccatggcccctggaactggtggaaacctttcctctaaccagaaagcctcgatatccttaattcaccaaggatccttggcgtggagtcttcctcccttctcccaagtctttctccgtgaacttttcctcctggactttgctaaagcagaacctcccagctctttgctgtctccggttgtctcttccctgtattcatggcaacatcagctgacagccccagttcacccctcggggcggaggatctcctgagtgattcatcagaaccccctgggctcaaccaagtgtcgtctgaagtgacctcccagctctatgcttctttgcgcctcagccggcaggcggaggccacggcccgagcccagctgtatttaccctccacctccccgcctcatgaagggttagacggcttcgcccaagaattgagtcgaagcttgtcagtcggattggaaaagaacttgaagaaaaaggtgagggaagtgtgtcttggagaccactgtggcactagacaccagagagtcttgggattggggttggtaaaaataaaaagctttgatgagatttgaactcttcctgttggatttcatattccttttaactgcataggcagccatgcttataagggagggagtgacctgggacaccataatttgaaaattatgaaacttcccagtgtttttttgtgagagacatctctgctccgagtagatagagcaaacctatggggtaggttggtgagctatttcccgtgcactgggaatgggtaaggtttcttgatcccaagagggagctagggacttaggatagcagctccgatccttccagctcaacactatgttgatagtatggttccaactt

SEQ ID NO: 479 - DNA, 8050 bp, Homo sapiens
actgagtcctagataccaagaagatcgttctagagagaaagtgactgagagtcatggagtccagaacaggagggtttagggctctctacccatcagagaagaagggttccacatagtagactcgggtggttatcccaaacatgcctggaaccccatcttagctggaaatactcaagtttcaccatcaagtatgatgctggcttcagagacggataaaaaacataacattaagttttccatctgtgtttcttaaaaaaaaaaaaaagaaaagaaaaagaaagaaaaagaaaaagaaaagctctccaggtgatctcagtatgcagccaagactaggaatcactgctagaattctgttttccttggagctgggaacagtgtctagcacatagtaagtactaattcctaagaaatgaatgaatgaggccaagcatgaagagcacataacacagcacctgtgctttgaaatatccacctggattgaggatgatttcttggggccagctatggtttgcatggatcttccaaaaagcagatttggaaacttagtccccagtgcaaccatgctaggaggtggggcctaatggaagggggttgggtcatgaggactctgccctcgttaatccacgcccagcacagattaacactgctgcgtcttgcacatccacaagcctgcgtgttctcttgccctttcaccttccactgtgggatgacacagcaagaaggccctcaacagatgtagaccccttggccttggacttcccagcctccagaaccataagaaacaaatctttgttctttatacatttctgtcccaggaattctgttaaagcagcacaaacagactaagacagcatctgaggcacagtgagagtgcctggggtgggaacttagtccagcagatgatccgctcaagtcagctggggacaggctctcagaggtcaaggcacggcccagactttccaccctttggtggaaggggaaagggtagcgggggcggggtgagggaaaaaagactactcaatggctacagtgtacaccgctctggtatggggtgcaacaaaatctcagaaatcactaaagaacatatccctgtaaccaaataccacctgttcccctaaaatctattgaaataaaaaataatttaaaataaacagagataccccttcaagttctctttgctatttatttgcataggttaataaaacctttcctaagtcaaaaaatctgtagcccgaaacatgtctgaattaactgaaacaggtggactctgaaggaatgcaccatgaccactgggatgccggcgtctcattcctttgacaatgatatgtctctttgtttaatgaagttattttatttttgggctgggcgcagtggctcatgcctgtaaaggcactttgagaagacgaggcaggtggatcacttgaggtcaggagttggagaccagcctgtccaacacggtgaaaccccatctctactaaaaatacaaaaattagctgggtgtggtggcacacgcttgtaatcccagctactcgggaggctgaggcaggaaaatcgcttgaacccaggaggcagaggtttcagcgagccaaaatcccaccattgcactccagcctgggtgacagagcgagaatctgtctccaaaaaaaaaggttattttactataaacatacaagtgtcaatataaaagaagcagctacccataactccacccccgtaatacaaccacaaatggtatttttgcctacttctagtttttttctatgactcctaaaaacaaaccaaaacccatagttttaacataaaattattatccgatgggtaagaaatacttaataccaaaggcagtctcacacattgcttcaaaatcatgtttaatggacatataacatttctacaactatctcaacttgctgaaccattttcctaatactggatttttacttagttttaattttttctctgtaataagactgcagtaaacattttcttatataactttttgtgtgattgagtgttgtaagctttcaataatgagaggttggagccttctgtccaaagagaaaattaaaagtgtggcacctgacccccacctccagaatttaatcaagatggggttattagtagtgaaagatgttattaggttgttgaagacaaagatgttttcaggaacaccatattcaagactggcgcttctctagtaatcttaacttggggctttttaatctcttgcacctcccttccactaaagggaaaaaaaacggagagcaaatcccacattagtcttttttgcggggaaggggccattccagggaagggtctgattgatgagtctatcggcaactgtgatcctgtgtcacccttgcctggggcctgtgaagaatattgagattacgagaggtacacctgtacattgcattcagaatacagccatctgatacagaaaacacaatgtagattgtaaaaaggagtttacaagaaaacctgacaagcttcctagatatcactgggtattaaattgggaatgttgatgtcatttgaaatggatttctttaagagttcttctcattaccagaagttttttgtgtttttttttttcaagaccttaaaaccggaactttcccgaagaaaaatgcaaataagaatctccttctgggaatccgacttagtgagccatcagaaatctgaactaggaagtctccgccccagctttgtcctttgattatacacacatgggcacatgcacagacacaaacaaatacagacatgggtacaaacacgtgagcacacacacagacacacagagactcacacacagagaagcagagacacacacacacacaggcagacactccacaaagggcacagaggtttaaacaatgactcacctgttccccaggcccggtcacttgcagggagctgaagagcctgtcatcaccagtccacagcgttgctacctgtctccgctttctcctctctctggtccaggggaaggtttgcttccctccacaggcaggacaggacaggaggagcctctactccaatggaaaacagccgcagagcagaggtcaagagcagcagcctcggaccagagcaatgcccactggaccccagcgccaaggtcaggcctcttctcctcccagaaggtttcagggcaaagtccacagtggtcatgtggtcacctgaggcagggcaggaggctggacctcaaagcaggtgacccgggagcacctgcgcgctgccggaagtcaagtcacattccagtcctgcatttcctggcacccaactggagcccgtttttcagctttattccggggtttcacttccaggatctcactttggcacagaatgtttttcttggctccttccttggagctgtatggaatctttgttgcacttgaaaaaccaacagcccagaagagaaaagaatattccggtcagatgaattaattcctcccactgtcagctagaagccatccctggctgagccctgcactggccagaggcaactgagtgtgagccagtccagggtcagatcctgggctgatgccacctgagggcggggtgggggcgtggcctccgtgcacatgggagactccaggtgcaggagagggggaggtggacttcctcttggtcttcccaagccatgaaacttcctggcttggtggtaacagaagagtctcctccaggtaagatttccagagcctctgagtatggctggggtagcagggttgggcctgaggctgaggagatggaaatctgttgccgtgaacattactccacacagccagtatacgggaagccagctcactttatgtcctccaaactcaccctaacttctcgtttgggtctcatcccgcggggctgctgggaaataagctccgccaccacagtggttcctccgccctgtgggagtggggggctcttatgctggaggggggacactggcctggacttctgctgaggctctgcccctcatccctgcaggacggactagccagtcctaacacaggactagcgttgctctaccacgtccaagcctcctctgagattcttcctccatgcaaccacttcccctggggcgtggccacctccctggaagccgccagcatgctcggctgggcccccgcactctggaggcttgagaatctctctatttttgaatgacgtccttatcctctgcccccaggctggtaaccaaaggtctgggggtggtgacgtgctgggaatggtgtaactcgtgagatggaggctgaatgtggaaatacatgaatgtgcttctcttctctccagttcccttgaagaatccaccttcctgcagggttgggggagcgcagaatgggaggaagatacaaataccaattttatagcaagaatgcaaaaagaggccagcgcggtggctcgagcctggaatcccagcactttggaaggcgagctgggcggatcacttgaggtcaggagttcgagaccagcctgaccaacatggagaaacctcatctctatgaaaaatacaaaaaaaaaaattagccaggtgtggtggcatgcacctataatcctagctgaggcaggagaattgcttgaacctgggaggcagaggttgcagtgagctgagatcatgccactgcatgccagcctgggcaacagagtgaaactatctcaaaaagtaaaaaaaaaaaaaaaaaaaaattaaaaagacaaaatggttaagaaccagctttttacacccaaaatgggaggtttgtacctacagtcagacaacaggtttgaaagccaggccttgtgtggagaagggagttttggaatcagctaagctcaactgtgattatgtcacagcccatcgctcatgttagagagggtcccgactccctagaaggcgaaaacccctcaaagaccccaagccagtccccaaacagcacagagctgtgccacgtggcaccccagccaccctttgagcaatgcacatgcgtaagatctcagaagtgaccggtgacggtgcagagaggccctgagggccaggcacgggacagcagaaggagacaccaagacaggcaggctcaggagctggtgcaggcagggccaaggtgcctcagaggctggcggtccaggcagacattttcagcagagaccacggggaagcgaggacctctcacagatgtaaggacacacatcccctccccacactgccacgaagtcaccggccatactcccaacccaggcaccagtgtccatgtgagagagaggggcaaggtggcggcgtccgggagaagcagcgttttacctggtgatcctttacgttactgtaggacagcagatctacagggttggacggactgaaatttaaaatccccccctcctctgtttcccactagatcaagcccctggagaagatctccttcattaacatgaggtaaaacacatgaagaaagtctgtgacttgtggcaggggacagggcacagagcttctgcagctcagaggagagagccctgtgttcacagtggctctcaccatggcctggagtaaaaccagcacagcccctctagcatccccgggtggacagggtcgatgcctgtgtagttatctctggatgtgtaacacatacccactgactcggcggcttacagtaacacgcagttatggcctcacagctcctgcggcccggagtcggggctcagcctcgctgctcagggtcccacaggctgcagtcaagacactggccaggctggggtctccttctgagttcagggtcctcttctgagcccacatgtttgttggcagaattcagttccctcagtaggctgaggtccccattcctgctggcgtcagtgggcagctgctgtcagctcttcaaggccccttcacacagggcagcttgctttctcaaggccagcgagagatgctctctgacttctagatcctcttttaaagggcccacctgattggggcagacacccccagcacaatctcccttttgctcaactcacagtcaatggacaagggaccctaattacatctgcaaaatcccttcacctttaccatgtaatataacctgatctcaggagtgacaccatcacagtcccagccctgcacacactcaaggggacagacatgtccaccaggggcttggaatcttggggcccatcctagagtccgttgtccacagtgcctgaaccaaagctcacacaagggaggcccccccagcccaggtgacttcacagcccactggcacacgcgggcgggtggcaggggagccagtgccgaagcccgcctcctgcttggccagtgtggcaaggcctggtgctcatgctgatctcaagcaacctgacaccctcctcatgaaggcccaagggtacagtgaaaggccagaactcagatacttaagagggtctgggggctcacagcttcccctcctgcacagaggtcatctgggagcaacctgccagatcctccctcgggaaccagtcagctcctcccaacaccaatttactcgcctccaaagtaagggggctgagccagatggttctaaacctccctccgcttccagcctctgtgacggatcactctatgcactaagggccatccagcgtgagcaggaagcctgtggtgcgctcgtgtaaatcagaaggtgcattcccatggggacatgggatggcaagctcagacacaaacctctcgtggaaggcgggtcaggactcaccgcccagacagtatccataatgccacatagatgtggtatcgtgcacaatcatcattgcttgtagtggaaatgaggcaaaacggaacataagcaatttacttacaggaccagaattaatattattttaacacataccaatttttaagtttgtctctggccattttatcaacttttctgtgttaccattgacagggagaatattcgcaatgccacttacacaggccacgtaggcaggcatgcacacattctccttccaaaacatgtaaaattatatcattgtggagcaggaagggccccctggggaggatgtggcctgagtgcccgcccaggggctgaagaatctctgcaactctcctgccacctgatgtctcgggttctgctcaaatattgacagtgatgggatttcctctgagagtttatcccatgtgggttcctttctagccaagtcagtcctttgtaactttccactctttactgccctggggttgcgtggagagccaggcctactgctgcataaacatttcagagatgttgaagcagctctcaaggcttgcaacaggcattgctaacggcctgccccagatccgtgccccccttgttccttatgaggagattccccactgtggttcaggttgttagtgcctctccgtatcttctttcttgcagatgtgaccaggtgacccccctctggccagggaacaatgggccgaagtcctcaggggatttgtggggaagcgcgccccctcctccttggggttttcttgcggagctgctgtgaagactcagctcagctgtgataattacctgaggtcagcttctccagaatgcccttatctcctaaggcctttgagataagcaggaattgtggtgtctgccttgcctccaaacctttatccttgcttatctcagtggaaaattccagcagggatttctgaacaccaagttaaattcctccactcaacaatcagtttggcacgtggctgcccgccagtctgggcagaacagaggggagccaagggaataaacccaagtcctgcccccaggtgcccagagcctggcggggatgggacagttgcctgcagagcaagaggctgccacccagtttcacacaggccagagaggctgacctacctgcccagaggcaggggaagaatccagaggacctctcccggaggaggcacgagaagcccacgtggcagccaagaagagggagagcatcctgggccccggaagcacaatgccaggggcagacatgcactgggaggcacggggccagggacaccttcagtgagcacagggtctgggtaggcttcgggaggggtgagggcggagaggcagccaagccgggttgtgggagg

SEQ ID NO: 480 - DNA, 8050 bp, Homo sapiens
cctttgccatctttccagattcatacccatactctccctctctgtcagtctctcaatataattacaaatacagtctgttgcctaaattaacatttagtaattaacattattacgcttttggaaaacattgtccacagctgagccatgtagagtactaggactgcatttcctttcctgtacaactctttggttttccaggagttgatagctgccaaacaaaaattcttcccacgctccccaacaaaatttaaaaccaactcaataggactttccacacatattaggtcatctctgatctgggtggggctgccctccataccctgggtccttttgtctagctgtcttccagggtccccctcatcctgatttggaggaccccttttctctttcagctaggttggatcacattttctgaatcccacaccatcctttttttatttacctcctcgtttgaatggaacacatcctccagtagctttctgagaaagggtatgtgggaagttaagttttggagtccttgaacatccgattatatctttattgcaccttcatgtttggtcttttgttatttagcaattctagctgaaaataacttttccttggaactttgaaagccttgctctgttgtctgctagtttttgcacacccaaagctgcttggattcttgatcctttgcatgacatctggctttcctctaggcgctttttaggattttctctttattcttggtgctctgaaatttcacaacaacgaggcttgagtgtctttttcattcaatgagctgaggacttgatgtcccacccccatttttttagagctggggtctcgctctgtcatccaggctggagtgcagtatcatgatcataactcactgcagccttgaccttctgggctcaaatgatcctcctacctcagcatcctgaataactgggaccacaggtgtgagtcaccatgcctggctaattttaaattttttgtagcaatggggtctcactatattctccaagctgctctcaacctcttgggctcaagtgatcctcccacctcagcctcccaaagtgctgggattagaggcatgagccacttcatccagcctatttagttattatttatttatttatttatttatttatttatttatttatttttgagacggagtctcgctctgttgcccaggctggagtgagtggtgtgatctcagctcacacctctgcttactgggttcaagcgactctcctgcctcagcctccccagtagctgggattccaagcacctgccaccacactcagctaattttttttgtattttttgtggagacagagtttcatcatgttgaccaggctggtctcgaactcctgacctcaagcgatccacctaccttggcctcccaaagtgctgggattacaagaatgagccaccatgcccagtgggcctatttatatttaaaaattatttattttaaaagagagtcttactctgtcacccaggctggagtgcagtggtgagatcatgctcactgtagccttgaacccccagcctcaagtgttcctcctgcctcagcctcccaaaatgctgagattacaggcatgagccactgcacctgaccacatttaaactggaaactcatctttcaacgctagattttttttcattatttgatcatctcttcctctatttttgaactgtctcttgatcaggtgacaaccctgcttcatcttaattcatcctctaactttttattctctttcatttcccatctttgcagctgcttgtgttccattttctgggatatctgctttactcttttttttttttttttttttttttgagatggagtttcactcttgttgcccaggctgaaatgcaatggcacgatcttggctcaccacaacttctgcctcccagattcaagcaattctcctgcctcagcctcccgagtagctgggattacaggcatgcaccaccacgtccagctaattttttttttttttttttttttttagtagagacagggtttcaccgtgttagccaggatggtcttgatctcctgacctcgtgatccgcccgcctcggcctcccaaagtgctgggattacaggcgtgagccaccgcgcccggccaatatctgcttaactttatcttccagtccttacatggaattattttactctggctgttatatattcacattttaagagcatttcctcactctctaatggtcccttttacttaacagcatcctgtacttgtttcatggatacgatatttttctcttactcctctgggaatattaattatagctttgcctgccttgtcggttccttctgagtttattcctcccccaccaaaccatttttctccattgttctcccccctcctgcctccctccctctctctctctccctctctttttcatgttagacgcttttctaaaatgtgcagtaacccacaggcatcacttgcatttaatcataaaacctgaaaccgcagttagaagccccacacattccaggtcagagggagtgaagtgtgcgtcagctcacaccctagacgggtgaacctgttgtccccgagacatgagtcatggcagaaggaacattcatttatttctgtggacgtgtatggacattgatctagcatgtcatgttccaggctgttctgcaacgaaaagaaaagctctctgtgccattccagtaggccacgacggctggcacagagaagagactgggagcagagacccactagtactacctgcaccaccggccacttctgggggtcacagagtagctggaactccgggatggagacaagggcaggacagcctcttcagcaccacagtcccagtctggatgcaggagagaaattgagattctgatggagtttcaagctgatgccacaaatgagcccatctgacttgtggcccagctcctagtgggggaagcctgtgttttgtacccactgacacccactgcattgaggggaggggttcacttcgctgctggagcaggaagagcaggactcggcttcagccctgccccatcaccccgagcctttgcttttctcccctttgcaagtgtctggtctgcaggccatggggcagcctccttcagccctctccgtgatctgtgcgggctgaccaagaggaagggtgacctgctcatctgggagaggaagaggtggtccctgcactctcccctcctcctccaaagtcttctttcttagatgttctgcgctccagagggtccactgggtgctcgagggaggccaagtctgggtggtctcagcctgtggataggggcaggagcaggaggcagggattcagatgtcggaattgggctgtggactcacagggtccctaagggtatcaggccttacaggagtgtcgctgctgctcattcgtagagcttggttgtcacagccagttgccatggcacacacctgtaatcccagtgctttgggaggctgaggccagaggatcacttgaggccaggcgttcgagaccagcctgggcaacatagcaagacttcccctccgcaaaaaaaaaaaagaaaagaaagaaaggaaaggccctggttagcccaccatttctggggaaggctgctgggttttgtgatgcaccccaggacctagtaattaaccagttatttcacccaagtctacactgagccaaaaactctcatgtgcagtttccatgtcatttccccaacacccccaggttggggctgcagaaaggagaggagaaagttaccaatatcaatttctgtggtcctttaggtagggagcgtttgagggtaggacggggtttggggggtatgaggcttggggggtgcctgagtgggctccatggagaagggggctggagggggtggtagccatgcctgcagaggggcactcacactgtgtccccttctttgtcctccccccacccccaccgcatctgctttccctgcctgtcctcgccttccattctgtctccaccgccctctggctgcatcctggactttcctgttgtctccctgttgaccttgctgtttccctgtctctgtctctgtgcgtccctgtgttccccgctgtctccccctccgcctctccctgcattcttgttgcttctgggctctccctgggaccttatgtgcattcgcctttccccaacgtgtcccttctcccctcctcctcatcctccgggcggcgtgcgcctcctgcctctccccggccggccacacggtggcgctgtgtcccgctcgcccgcccgcccgccgctcgcccgcagcctgcaagcgcaaggaacaggagcagcagaaggagcgcgccctgcagcccaagaagcagcgcctggtgttcaccgacctgcagcgacgcacgctgatcgccatcttcaaggagaacaagcggccgtccaaggagatgcaggtcaccatctcgcagcagctcggcttggagctcaacaccgtcagcaacttcttcatgaacgcgcggcgccgctgcatgaaccgctgggctgaggagcccagcacggcccccgggggccccgccggcgccacggccactttctccaaggcctgaggcgccccggccccgcgccctccctgcctccacggcctgggcgctgtgcccccacgtcacctccccacatcctgccggcccggagacccgcccccagggggcacctggagggggtgctatccgggccccccacacccggggagggggaagcagcacaccccccagcccaagtgcacaaaaagggccccccttcctccctccatgcccactccctccaggccaaaggaagccctccacccccccccggaggggagggagtgacagaaaggggtttcccagccccctctccattcaggacgcccagagggcctcgagaaaaaccagggctcactgtgttgtcccctaaagcgggtcaagaagcacatactagaaatataaaccgggtatttaaaaatggaattttaaagaataacccctcctccgtcagatcccctgccccaccgagggaggtagtagaaaacttccttcctccccacccgccccggccccctccccagggacctcagccctttccaaagtcgccaaaaacccacatcaagccggatccttacggtcccccaccctctccaaaaccaaccccacccgctggcaggacggcccctgcggccgagaactgagctgcccctctctgcggccaggattcctcgtgccaagaatcgcctgccttaaagtctggggaggggcctgcggcgggcgcccagcacctacgggcgagcacccttcccaccccatcccaggccgcaggggacggggggctcccacgtgcgggtaaattccagacgcccccgccccgccccgtctgttgagttcactttacctttaggcaccttcgtggagcgcaaggaaggacgcagctccggacacgggagaccacgcccaggctcccaggagaaggggacccggccggagaaggcgccgctggggccgcccggaggagcccctctgcacgggcccgtggagacgcttcctgcgtggaaccttctggaatccaccgcccccctttccgcccgcgtcagggtctgaactgggcttgcaggggggcagcggggttgaacgtggtgttggtttccactctcgccaaagagagaagacgccgaggaaggtggattccgcttgctccattttttgccaaaaatatttacaaatgggaagggtcggaaatgaagatgagcgcccccctcccaccccgcgctctcccccgctcctctcatctggtctgggtgacctccgagactggccggccgcgggatcccaggagcccgcctcctccgggggttcaagatccgagtctagaaggaacctcctccctgaaatccccccactcatcggctgcctcccagggaggaggcggcccccctaccccccttgaaaatgcaaaagacatttctagtgaaatgcccctcccctcccccaggtaaaggctacctcactcaagctcatgtctgtgattggaaaatcacgcctgataccaaagatttctcccaaggatttgtgctggatgacaggattccctggcctgggacccggctcggggccccgcctgccgagtgccaccccttcccgaacctgagagcgaaagagagagagagagagagggagagagagggagagaaagggagagagggagggagaggatcgtgaggtcgaagagtgccttcttcttgaaccaaagacgtgtatggagtgttctcttgtccttatcgacttgctctgctcccagctttccaagcgaccggatctgagtgatgcttctagaacatttgggtgttggggggttcccaatagtagaaagggtccccattcctgctcagcaccgcacctctctacccccccacagacacacatgcagacacacacatgcagacaacacgcagacacacacatgcaggcactcacatgcaggcccatgcacacacacgtgcacacacatgcagagacatgcagacacgcaggcacacatgcacacatgcaaagacacgcatgcaggcacacgcagacgcacacagagacacacatgcagatacacatgcacacacacatacacacactggcccctgtttttctgtggtgtcactgggtgccagcaactcggtatctcccacctcccactaaaacctgggccttaatttctctcccgtccccacccctaaattcctgatggatgaacctagagctgtcctgtccactccaggccggactgacgtagcctatgggcccagcaggtccagggcccacgttttaatttctttttaaaaagctttaggtcttgccgggcgcggtggttcacgcctggaatcccagcattttgggaggccgaggcgggtggatcacaaggtcagcagttcaagaccagcctgaccaacatggtgaaaccctgtctctactaaaaatacaaaaaaattagctgggcgaggtggcaggcacctgtaatcccagccacctgggaggctgaggcaggagaatctcttgaaactggaaggcagaggttgcagtgagccgagattgcgccactacactctagcctgggcaacgagagcaaaactccctctcaaaaaaaaaaaaaaaaaaaaaaactttaggtccaagaagatgcaccccattcaacataccatattatttgtctttataccaaggtagcctatagatatacaatgttttaaatttcttttttagaaacagggttttgctctgttacccaggctggagtgcagtggtgcaatcgtagctcactgcagcctcgaccacctgggctcaagtgatcctcctgcctcagcctcccagtagctggggccacaagcacaccccaccatgcccatttaattttttaagggatttcttgtagatatggggtctcactatgctgcccaggctggtcttgaactcctggccccaagggggtcctcctgcctcggcctccaaaagtgctaggattacaggtagatagacatttagtggaggaagaggctctcaaaggcaataaaatgcttctgatccaagagaatcacgctgcagccctggcccagtgagcttcttagaaaatcgatgcctgggcttcaggcactggccggagcacgggcctggcggggtgctgggtctcctagatgccctctgcttggccttcaaggccccaagggtaacacgctagggggcctccagttttgtcccctgctggaaatttaggacttggcttgggatcgttctggttgtggaatgttttagctatgctgaactgtggtcagatcaggtcaagcctcttggtcacagaagtggcccagcagcactttgggaggccgagacaggaggatcgcttgaggccaggagtttgagaccagcctgggcaacacagcaagaccccacttctacaaaaaaaaataaataaagtggcccaggactcctggatccttttcagatatcttcgtatcacacacacacacacacacacacacacacacacacacacacacacacccctacctgtttccggaccc
